(19) United States
(12) Patent Application Publication
(10) Pub. No.: US 2023/0146593 A1
(43) Pub. Date: May 11, 2023

(54) METHOD FOR TREATMENT AND PROPHYLAXIS OF CRS IN PATIENTS COMPRISING A COMBINATION OF BISPECIFIC ANTIBODIES BINDING TO CDS X CANCER CELL AND TNF ALPHA OR IL-6 INHIBITOR

(71) Applicant: AMGEN INC., Thousand Oaks, CA (US)

(72) Inventors: Sophia K. Khaldoyanidi, Thousand Oaks, CA (US); Dirk Nagorsen, Thousand Oaks, CA (US); Tara Arvedson, Thousand Oaks, CA (US); Suresh Agarwal, Thousand Oaks, CA (US); Vijay Vishesh Upreti, Thousand Oaks, CA (US); Steven Yea, Thousand Oaks, CA (US)

(21) Appl. No.: 17/910,698

(22) PCT Filed: Mar. 12, 2021
(86) PCT No.: PCT/US21/22073

§ 371 Date: Sep. 9, 2022

Related U.S. Application Data
(60) Provisional application No. 62/988,489, filed on Mar. 12, 2020.

(51) Int. Cl. A61K 39/395; A61K 38/17; A61K 45/06; A61P 35/00

(52) U.S. Cl. CPC A61K 39/3955; A61K 38/1793; A61K 45/06; A61P 35/00

(57) ABSTRACT

The present invention relates to medical combination products comprising (i) at least one antibody construct comprising at least one domain which binds to a target antigen expressed on the surface of a cell and at least one other domain which binds to CD3 as well as (ii) at least one molecule that is inhibitor/antagonist of TNF/TNFR reducing TNF/TNFR signaling and/or an inhibitor/antagonist of IL6/IL6R that reduces IL6/IL6R signaling, wherein a first dose of said inhibitor/antagonist is administered before administration of a first dose of said antibody construct. Furthermore, the invention provides therapeutic and preventive methods and medical uses of said combination products, as well as a kit comprising said at least one antibody construct and at least one antagonist/inhibitor of TNF or IL6 or its cognate receptor, wherein the interaction of said antagonist/inhibitor of TNF or an inhibitor/antagonist of IL6 with its cognate receptor reduces, mitigates, prevents, or treats cytokine release syndrome.

[0001] The present invention relates to medical uses of antibody constructs comprising at least one domain which binds to CD3 on a T cell and at least one other domain that binds a target on a target cell in combinations with inhibitors/antagonists of TNF-alpha (TNF) and/or TNF-alpha-Receptor (TNFR), thereby reducing or blocking signaling that is based on a TNF/TNFR interaction, or inhibitors/antagonists of interleukin 6 (IL6) and/or IL6-Receptor (IL6R), thereby reducing or blocking signaling that is based on a IL6/IL6R interaction. The pharmaceutical combination products or kits comprising the above inhibitors/antagonists and CD3-binding antibody constructs disclosed herein may be used in the treatment, prevention or mitigation of neoplastic cell growth or cancer and block the development of cytokine release syndrome (CRS) or tumor lysis syndrome (TLS) or mitigate, ameliorate or treat symptoms associated with excessive release of cytokines, particularly with CRS or TLS.

### BACKGROUND OF THE INVENTION

[0002] Recently, immunotherapeutic approaches in the treatment, prevention, mitigation of neoplastic cell growth in cancer patients have witnessed impressive progress. For example, the CD19-directed bispecific T-cell engager (BiTE®) molecule Blinatumumab was approved in 2014 for treating Philadelphia chromosome-negative relapsed or refractory B-cell precursor ALL under the FDA's accelerated approval program. T cell engaging (TCE) constructs comprising one domain that binds to CD3 on T cells and another domain that binds to a protein expressed on target cells directly connect T cells to target cells to induce T cell redirected lysis. This mechanism of action is distinct from chemotherapy and other immunotherapy in that it can work with any CD3-positive T cell, independent of a costimulatory activating signal (Klinger et al., Immunol Reviews 2016).

[0003] However, occasionally patients that have been treated with effector molecules that comprise a domain binding CD3 are associated with adverse events, for example, due to an excessive activation of the immune system resulting in the release of proinflammatory cytokines. The release of these cytokines may cause milder adverse events, such as mild headaches. In rare events, patients may develop CRS. CRS can present with a variety of symptoms ranging from mild, flu-like symptoms to severe life-threatening manifestations of the excessive inflammatory response. Mild symptoms of CRS include fever, fatigue, headache, rashes, arthralgia, and myalgia. More severe cases are characterized by hypotension as well as high fever and can progress to an uncontrolled systems inflammatory response with vasopressor-requiring circulatory shock, vascular leakage, disseminated intravascular coagulation, and multi-organ system failure. Laboratory abnormalities that are common in patients with CRS include cytopenias, elevated creatinine and liver enzymes, deranged coagulation parameters, and a high CRP (Shimabukuro-Vornhagen et al., J. ImmunoTher Cancer (2018) 6:56). These adverse events are not only seen in patients treated with BiTE® molecules, but also in patients who have been administered with monoclonal antibodies, chimeric antigen receptor (CAR) T-cells, and tyrosine kinase inhibitors (Riegler et al., Therapeutics and Clinical Risk Management 2019: 15, 323-335).

[0004] The FDA recently approved tocilizumab, a monoclonal antibody that competes with the binding of the proinflammatory cytokine IL6 to its receptor, IL6R, thereby inhibiting IL6R signaling in effector cells, for the treatment of severe or life-threatening CAR T-cell-induced CRS in adults and pediatric patients that are older than 2 years. However, tocilizumab is not recommended for the primary management of neurotoxicity, one possible adverse event associated with immunotherapy (e.g., administration of T cell engaging target-specific immunoglobulin-based constructs) and some patients do not respond to tocilizumab. In addition, tocilizumab might increase the risk of long-term immunosuppression and repetitive administration of tocilizumab to patients with rheumatic diseases has resulted in a higher incidence of lower intestinal perforations, which may not occur in the acute setting (Borrega et al., HemaSphere (2019) 3:2 (e19).

[0005] Other immunomodulatory agents that have been used or suggested for the treatment of CRS relate to very specific applications. For example, the anti-IL-6 antibody siltuximab, T cell depleting antibody alemtuzumab and Anti-Thymocyte Globulin (ATG), IL-1-based inhibitors (anakinra), cyclophosphamide, ibrutinib, and GM-CSF inhibition or cytokine adsorption have been suggested (Borrega et al., HemaSphere (2019) 3:2 (e19)). TNF-alpha (hereinafter referred to simply as “TNF” in view of the old misleading and no longer used designation “TNF-beta” for the cytokine “lymphotoxin” as suggested, inter alia, by I. A. Clark/Cytokine & Growth Factor Reviews 18 (2007) 335-343), another player in the CRS development has also been discussed. TNF inhibitors/antagonists such as etanercept and infliximab have been used with mixed results in treating severe CRS (Riegler et al., Therapeutics and Clinical Risk Management 2019: 15, 323-335; Li et al, Sci Transl Med 11, eaax8861 (2019)).

[0006] Approaches have been made to prevent, reduce or treat adverse events associated with the administration of antibody constructs comprising a T cell engager domain, e.g., a CD3 binding domain, by co-administration with glucocorticoids, for example with dexamethasone. Corticosteroids have also been used in the treatment of CAR T-cell therapy-associated CRS but results of clinical trials are divergent (Borrega et al., HemaSphere (2019) 3:2 (e19)). The general picture concerning the treatment of CRS using different immunotherapeutic approaches is therefore unclear. While in a given therapeutic setting, a specific inhibitor or modulator may be effective, other immunotherapeutic approaches that may provoke or did result in CRS may require different approaches. Accordingly, there is a persistent need for new immunotherapies in which CRS is prevented, reduced, mitigated and/or treated.

[0007] Additionally, the administration of antibody constructs engaging T cells via a domain binding CD3, which comprise at least one further domain binding a tumor antigen, occasionally requires initial high dosages to achieve maximum efficacy. High initial doses of such antibody constructs, when administered to a patient in need thereof, may also increase the risk of adverse events. This applies, for example, to half-life extended antibody constructs according to the present invention. Schemes involving the prior administration of TNF/TNFR-signaling inhibitors represent a solution to prevent adverse events, i.e. prophylactic administration provides a solution to challenges associated with initial high dosing of antibody constructs.

[0008] Further, there is also a need to provide new preventive and therapeutic measures against adverse events associated with the administration of antibody constructs comprising a T cell engager domain, e.g., a CD3 binding domain, particularly for cancer patients having a corticosteroid intolerance, for example a dexamethasone intolerance, or particularly for cancer that are at risk of developing adverse events against corticosteroids, such as dexamethasone.

[0009] Similarly, there is a need to provide new preventive measures against adverse events associated with the administration of antibody constructs comprising a T cell engager domain, e.g., a CD3 binding domain, particularly for cancer patients with an intolerance against IL6 antagonists or IL6R-antagonists, for example, particularly for cancer patients with a tocilizumab intolerance, or cancer patients that are at risk of developing adverse events against such IL6 antagonists or IL6R-antagonists, for example a tocilizumab, e.g., for those cancer patients that have developed autoantibodies against tocilizumab.

### DETAILED DESCRIPTION OF THE INVENTION

[0010] The above and other problems are solved by the present invention. The present invention relates, inter alia, to the following aspects and embodiments as well as to all combinations of these embodiments provided no scientific or technical reasons exist that render such combination unfeasible. Respective products, their uses and methods involving the same will be shown in separate sections in the following description of the invention.

### General Aspect A)—Combination Products

[0011] (i) A combination product for the treatment of a cancer, and optionally also for the prevention, prophylaxis, or reduction of adverse events associated with cancer immunotherapy with an antibody construct comprising at least one domain (also referred to as “first domain”) which binds to a target antigen on the surface of a target cell, and at least one other domain (also referred to as “second domain”) which binds to CD3, preferably human CD3, on the surface of a T cell, comprising
[0012] (a) at least one antibody construct referred to in the preamble, and
[0013] (b) an inhibitor/antagonist of TNF/TNFR that reduces TNF/TNFR signaling,
   wherein said inhibitor/antagonist of TNF/TNFR that reduces TNF/TNFR signaling referred to in (b) is for administration to a patient prior to and optionally also following administration of said antibody construct referred to in (a), particularly, wherein the patient is either a human being or a non-human primate, and wherein the first domain binds selectively to a target antigen selected from the group comprising CD19, CD33, FLT3, PSMA, and DLL3.
   (ii) The combination product for the treatment of a cancer, and optionally also for the prevention, prophylaxis, or reduction of adverse events associated with cancer immunotherapy according to embodiment (i) with an antibody construct comprising a first domain which binds to a target antigen on the surface of a target cell, and a second domain which binds to CD3 on the surface of a T cell, wherein the adverse event associated with immunotherapy is increased cytokine release of TNF, IL-1, MCP-1, and/or IL6, particularly wherein the adverse event is cytokine release syndrome (CRS) or tumor lysis syndrome (Us), wherein the group of adverse events further comprises a neurological reaction, preferably one or more selected from the group consisting of: confusion, ataxia, disorientation, dysphasia, aphasia, speech impairment, cerebellar symptoms, tremor, apraxia, seizure, grand mal convulsion, palsy, and balance disorder.
   (iii) The combination product according to embodiment (i) or (ii) for the treatment of a cancer, and optionally also the prevention prophylaxis, or reduction of adverse events associated with cancer immunotherapy with an antibody construct comprising a first domain which binds to a target antigen on the surface of a target cell, and a second domain which binds to CD3 on the surface of a T cell, wherein the second domain of said antibody construct binds to human CD3 epsilon and to Callithrix jacchus or Saimiri sciureus CD3 epsilon.
   (iv) The combination product according to any one of embodiments (i) to (iii) for the treatment of a cancer, and optionally also, the prevention, prophylaxis, or reduction of adverse events associated with cancer immunotherapy with an antibody construct comprising a first domain which binds to a target antigen on the surface of a target cell, and a second domain which binds to CD3 on the surface of a T cell, wherein
[0014] (a) the antibody construct is a single chain antibody construct,
[0015] (b) the first domain is in the format of an scFv,
[0016] (c) the second domain is in the format of an scFv,
[0017] (d) the first and the second domain are connected via a linker, and/or
[0018] (e) the antibody construct comprises a domain providing an extended serum half-life.
   (v) The combination product according to any one of the preceding embodiments for the treatment of a cancer, and optionally also for the prevention, prophylaxis, or reduction of adverse events associated with cancer immunotherapy with an antibody construct comprising a first domain which binds to a target antigen on the surface of a target cell, and a second domain which binds to CD3 on the surface of a T cell, wherein the inhibitor/antagonist of TNF/TNFR that reduces TNF/TNFR signaling is selected from the group comprising small molecules, biological molecules, antibodies and derivatives thereof, and aptamers.
   (vi) The combination product according to any one of the preceding embodiments for the treatment of a cancer, and optionally also for the prevention, prophylaxis, or reduction of adverse events associated with cancer immunotherapy with an antibody construct comprising a first domain which binds to a target antigen on the surface of a target cell, and a inhibitor/antagonist of TNF/TNFR that reduces TNF/TNFR signaling is selected from the group of TNF inhibitors/antagonists comprising etanercept, infliximab, adalimumab, certolizumab Pergol, and golimumab, particularly etanercept, for example as disclosed in WO2018/075818A1, which is hereby incorporated by reference in its entirety.
   (vii) The combination product according to any one of the preceding embodiments for the treatment of a cancer, and optionally also, for the prevention, prophylaxis, or reduction of adverse events associated with cancer immunotherapy with an antibody construct comprising a first domain which binds to a target antigen on the surface of a target cell, and a second domain which binds to CD3 on the surface of a T cell, wherein the first domain binds to a target antigen, wherein said target antigen is a tumor-associated antigen that is expressed or present on solid tumors and/or hematological tumors selected from the group consisting of CD19, CD33, FLT3, PSMA, BCMA, Claudin 6, Claudin 18.2, Mucin 17, and DLL3.
   (viii) The combination product according to any of the precending embodiments for the treatment of a cancer, and optionally also for the prevention, prophylaxis, or reduction of adverse events associated with cancer immunotherapy with an antibody construct comprising a first domain which binds to a target antigen on the surface of a target cell, and a second domain which binds to CD3, preferably human CD3, on the surface of a T cell, wherein said combination product is for administration to a patient at risk of developing adverse events or having an intolerance to at least one of a group comprising corticosteroids, IL-6-inhibitors, IL-6R-inhibitors, and/or TNF/TNFR inhibitors different from an inhibitor/antagonist of TNF/35 TNFR that reduces TNF/TNFR signaling according to any of the preceding embodiments.
   (ix) The combination product according to any of the precending embodiments for the treatment of a cancer, and optionally also for the prevention, prophylaxis, or reduction of adverse events associated with cancer immunotherapy with an antibody construct comprising a first domain which binds to a target antigen on the surface of a target cell, and a second domain which binds to CD3 on the surface of a T cell, wherein said combination product is for administration to a patient at risk of developing adverse events or having an intolerance to corticosteroids, wherein the corticosteroid is dexamethasone.
   (x) The combination product according to any of the precending embodiments for the treatment of a cancer, and optionally also for the prevention, prophylaxis, or reduction of adverse events associated with cancer immunotherapy with an antibody construct comprising a first domain which binds to a target antigen on the surface of a target cell, and a second domain which binds to CD3 on the surface of a T cell, wherein the combination product is for administration to a patient at risk of developing adverse events or having an intolerance to IL-6-antagonists and/or IL-6R-antagonists, wherein said IL-6-antagonists and/or IL-6R-antagonists are selected from the group comprising tocilizumab, siltuximab, olokizumab, elsilimomab, clazakizumab, sirukumab, particularly tocilizumab, and/or wherein the combination product is for administration to a patient at risk of developing adverse events or having an intolerance to TNF/TNFR inhibitors, wherein said TNF/TNFR inhibitor is selected from the group comprising infliximab, adalimumab, certolizumab Pergol, and/or golimumab.
   (xi) The combination product according to any of embodiments (i) to (x) and (xii) for the treatment of a cancer, and optionally also for the prevention, prophylaxis, or reduction of adverse events associated with cancer immunotherapy with an antibody construct comprising a first domain which binds to a target antigen on the surface of a target cell, and a second domain which binds to CD3 on the surface of a T cell, wherein said combination product further comprises at least one corticosteroid, and/or a non-glucocorticoidal compound.
   (xii) The combination product according to any of embodiments (i) to (x) and (xiii) for the treatment of a cancer, and optionally also for the prevention, prophylaxis, or reduction of adverse events associated with cancer immunotherapy of a disease with an antibody construct comprising a first domain which binds to a target antigen on the surface of a target cell, and a second domain which binds to CD3 on the surface of a T cell, said combination product further comprises at least one corticosteroid, wherein said corticostoid is dexamethasone, and/or said non-glucocorticoidal compound is selected from the group comprising natalizumab, PPS, and minocylin.
   (xiii) The combination product according to any of embodiments (i) to (xi), (xiii), and (xiv) for the treatment of a cancer and optionally also, for the prevention, prophylaxis, or reduction of adverse events associated with cancer immunotherapy with an antibody construct comprising a first domain which binds to a target antigen on the surface of a target cell, and a second domain which binds to CD3 on the surface of a T cell, wherein said combination product further comprises an IL-6R-antagonist, wherein said IL-6R-antagonist is tocilizumab.
   (xiv) The combination product according to any of embodiments (i) to (ix) for the treatment of a cancer, and, optionally also, for the prevention, prophylaxis, or reduction of adverse events associated with cancer immunotherapy of a disease with an antibody construct comprising a first domain which binds to a target antigen on the surface of a target cell, and a second domain which binds to CD3 on the surface of a T cell, further comprising at least one corticosteroid, particularly dexamethasone and/or at least one IL-6 and/or IL-6R-antagonist, particularly tocilizumab, wherein said at least one corticosteroid and/or said IL-6 and/or IL-6R-antagonist is for administration to a patient in need thereof prior to, concomitant with, and/or after administration of said antibody construct (a).

[0019] The combination products according to any one of the above embodiments comprise antibody constructs, which are described in the following sections entitled Sub-Aspect A-1 to Sub-Aspect A-5.

### Sub-Aspect A-1—Constructs Binding CD19 in Combination Products of the Invention

[0020] According to the present invention, one target antigen on the surface of a target cell that is selectively bound by the first domain of the antibody constructs, which are part of combination products, kits, etc., and may be used or administered in methods according to the invention, is CD19.

[0021] According to the invention, antibody contructs that comprise a CD19-binding domain are disclosed, for example, in WO2010052014, which is hereby incorporated by reference in its entirety. Some of the therein disclosed antibody constructs and domains binding to CD19 are also shown in the Sequence Listing below.

[0022] Also encompassed in the combination products according to the present invention may be antibodies competing with those explicitly recited herein, i.e. those characterized by specific SEQ ID numbers. Whether or not an antibody construct binds to the same epitope of CD19 as another given antibody construct can be measured e.g. by epitope mapping with chimeric or truncated target molecules, e.g. as described herein above and in the Examples in WO2017021362. Further, whether an antibody construct competes for binding with another given antibody construct can be measured in a competition assay such as a competitive ELISA or a cell-based competition assay. Avidin-coupled microparticles (beads) can also be used. Like an avidin-coated ELISA plate, when reacted with a biotinylated protein, each of these beads can be used as a substrate on which an assay can be performed. Antigen is coated onto a bead and then precoated with the first antibody. The second antibody is added, and any additional binding is determined. Possible methods for the read-out include flow cytometry.

[0023] Accordingly, it is envisaged for the antibody construct used in accordance with the present invention that the domain which binds to CD19 comprises a VH region comprising CDR-H1, CDR-H2 and CDR-H3 selected from: CDR-H1 as depicted in SEQ ID NO: 310, CDR-H2 as depicted in SEQ ID NO: 312, and CDR-H3 as depicted in SEQ ID NO: 313; CDR-H1 as depicted in SEQ ID NO: 311, CDR-H2 as depicted in SEQ ID NO: 312, and CDR-H3 as depicted in SEQ ID NO: 313.

[0024] It is also envisaged for the antibody construct used in accordance with the present invention that the domain which binds to CD19 comprises a VL region comprising CDR-L1, CDR-L2 and CDR-L3, wherein CDR-L1 is depicted in SEQ ID NO:314, CDR-L2 is depicted in SEQ ID NO: 315, and CDR-L3 is depicted in SEQ ID NO: 316.

[0025] It is furthermore envisaged for the antibody construct used in accordance with the present invention that the domain which binds to CD19 comprises a VL region comprising CDR-L1, CDR-L2 and CDR-L3 and a VH region comprising CDR-H1, CDR-H2 and CDR-H3 selected from: CDR-L1 as depicted in SEQ ID NO:314, CDR-L2 as depicted in SEQ ID NO: 315, and CDR-L3 as depicted in SEQ ID NO: 316, CDR-H1 as depicted in SEQ ID NO: 310, CDR-H2 as depicted in SEQ ID NO: 312, and CDR-H3 as depicted in SEQ ID NO: 313; and CDR-L1 as depicted in SEQ ID NO:314, CDR-L2 as depicted in SEQ ID NO: 315, and CDR-L3 as depicted in SEQ ID NO: 316, CDR-H1 as depicted in SEQ ID NO: 311, CDR-142 as depicted in SEQ ID NO: 312, and CDR-H3 as depicted in SEQ ID NO: 313.

[0026] It is envisaged for the antibody construct used in accordance with the present invention that the domain which binds to CD19 comprises a VH region as depicted in any one of SEQ ID NO: 308.

[0027] It is also envisaged for the antibody construct used in accordance with the present invention that the domain which binds to CD19 that the domain which binds to CD19 comprises a VL region as depicted in SEQ ID NO: 309.

[0028] More preferably, the antibody construct in accordance with the present invention is characterized by the domain which binds to CD19 comprising a VL region and a VH region consisting a VH region as depicted in SEQ ID NO: 308 and a VL region as depicted in SEQ ID NO: 309.

[0029] Also encompassed are antibody constructs that compete for binding to CD19 with an antibody construct in accordance with the present invention that is characterized by a domain which binds to CD19 comprising a VL region and a VH region consisting a VL region as depicted in SEQ ID NO: 309 and a VH region as depicted in SEQ ID NO: 308, or with an antibody construct having a domain which binds to CD19 comprises a VL region comprising CDR-L1, CDR-L2 and CDR-L3 and a VH region comprising CDR-H1, CDR-H2 and CDR-H3 selected from: CDR-L1 as depicted in SEQ ID NO:314, CDR-L2 as depicted in SEQ ID NO: 315, and CDR-L3 as depicted in SEQ ID NO: 316, CDR-H1 as depicted in SEQ ID NO: 310, CDR-H2 as depicted in SEQ ID NO: 312, and CDR-H3 as depicted in SEQ ID NO: 313; and CDR-L1 as depicted in SEQ ID NO:314, CDR-L2 as depicted in SEQ ID NO: 315, and CDR-L3 as depicted in SEQ ID NO: 316, CDR-H1 as depicted in SEQ ID NO: 311, CDR-H2 as depicted in SEQ ID NO: 312, and CDR-H3 as depicted in SEQ ID NO: 313.

[0030] As used herein, the term “compete for binding” means, that the binding of the explicitly defined antibodies in the above paragraphs of this sub-aspect is reduced by competition by a competition antibody that binds to CD19, preferably to an epitope that is bound by any of the above explicitly defined antibodies. The binding of the explicitly defined antibodies is reduced by at least 50%, by at least 60%, by at least 70%, by at least 80%, by at least 90%, by at least 95%, or even more.

[0031] The competition antibodies may have VL and/or VH regions that differ in their amino acid sequence(s) from the explicitly described antibodies, when both, the competition antibodies and the explicitly described antibodies are co-incubated in a competition assay with target cells that express CD19, wherein both, competition antibody and explicitly defined antibody are used at equimolar concentrations in such competition assays.

[0032] The competition antibody may be labelled (the explicitly defined antibody may be unlabeled or differently labelled to permit a quantification) to distinguish the number of competition antibody bound to the target antigen at the end of the competition binding assay method.

[0033] The amount/number of competition antibody that binds under such circumstances to the target should be at least 50%, at least 60%, at least 70%, at least 80%, at least 90%, preferably at least 95% of all antibodies selectively binding to the target antigen. The competition antibody may comprise one or more, e.g., at least 2, 3, 4, 5, 6, 7, 8, 9, 10, 11, 12, 13, 14, 15, 16, 17, 18, 19, 20 or even more amino acid residues that are different from the explicitly disclosed antibodies.

[0034] In preferred aspects of the invention, the competition antibodies have at least 1, 2, 3, 4, 5, 6, 7, 8, 9, 10, or more amino acid residues that are different from the herein described antibodies characterized by a domain which binds to CD19 comprising a VL region and a VH region consisting a VL region as depicted in SEQ ID NO: 309 and a VH region as depicted in SEQ ID NO: 308, or with an antibody construct having a domain which binds to CD19 comprises a VL region comprising CDR-L1, CDR-L2 and CDR-L3 and a VH region comprising CDR-H1, CDR-H2 and CDR-H3 selected from: CDR-L1 as depicted in SEQ ID NO:314, CDR-L2 as depicted in SEQ ID NO: 315, and CDR-L3 as depicted in SEQ ID NO: 316, CDR-H1 as depicted in SEQ ID NO: 310, CDR-H2 as depicted in SEQ ID NO: 312, and CDR-H3 as depicted in SEQ ID NO: 313; and CDR-L1 as depicted in SEQ ID NO:314, CDR-L2 as depicted in SEQ ID NO: 315, and CDR-L3 as depicted in SEQ ID NO: 316, CDR-H1 as depicted in SEQ ID NO: 311, CDR-H2 as depicted in SEQ ID NO: 312, and CDR-H3 as depicted in SEQ ID NO: 313.

(i) Therefore, the combination product for the treatment of cancer, and optionally also/preferably for the prevention, prophylaxis, or reduction of adverse events associated with immunotherapy, particularly cancer immunotherapy, with an antibody construct comprising at least one domain (also referred to as “first domain”) which binds to CD19 on the surface of a target cell, and at least one other domain (also referred to as “second domain”) which binds to CD3, preferably human CD3, on the surface of a T cell according to any one of embodiments (i) to (xiv) of general Aspect A), comprising
[0035] (a) at least one antibody construct referred to in the preamble, and
[0036] (b) an inhibitor/antagonist of TNF/TNFR that reduces TNF/TNFR signaling,
   wherein said inhibitor/antagonist of TNF/TNFR that reduces TNF/TNFR signaling referred to in (b) is for administration to a patient prior to and optionally also following administration of said antibody construct referred to in (a), particularly wherein the patient is not a rodent, and more particularly wherein the patient is either a human being or a non-human primate.
   (ii) The combination product for the treatment of cancer, and optionally also/preferably for the prevention, prophylaxis, or reduction of adverse events associated with immunotherapy, particularly cancer immunotherapy of leukemia, particularly of acute lymphoblastic leukemia (ALL), with an antibody construct comprising at least one domain which binds to CD19 on the surface of a target cell, and at least one other domain which binds to CD3, preferably human CD3, on the surface of a T cell according to embodiment (i) of Sub-Aspect A-1), comprising
[0037] (a) at least one antibody construct referred to in the preamble, and
[0038] (b) an inhibitor/antagonist of TNF/TNFR that reduces TNF/TNFR signaling,
   wherein said inhibitor/antagonist of TNF/TNFR that reduces TNF/TNFR signaling referred to in (b) is for administration to a patient prior to and optionally also following administration of said antibody construct referred to in (a), and optionally also following administration of said antibody construct, wherein said antibody construct binds to an epitope that is selectively bound by an antibody/antibody construct that has the VH chain and/or VL chain respectively, that are disclosed in WO2010052014, particularly in the sequence listing, which is hereby incorporated by reference in its entirety.
   (iii) The combination product for the treatment and optionally also/preferably for the prevention, prophylaxis, or reduction of adverse events associated with immunotherapy, particularly cancer immunotherapy of leukemia, particularly of acute lymphoblastic leukemia (ALL), with an antibody construct comprising at least one domain which binds to CD19 on the surface of a target cell, and at least one other domain which binds to CD3, preferably human CD3, on the surface of a T cell according to embodiment (i) or (ii) of Sub-Aspect A-1), comprising
[0039] (a) at least one antibody construct referred to in the preamble, and
[0040] (b) an inhibitor/antagonist of TNF/TNFR that reduces TNF/TNFR signaling,
   wherein said inhibitor/antagonist of TNF/TNFR that reduces TNF/TNFR signaling referred to in (b) is for administration to a patient prior to and optionally also following administration of said antibody construct referred to in (a), wherein said antibody construct binds to an epitope that is selectively bound by an antibody/antibody construct that has the following VH chains and/or VL chains respectively that are disclosed in WO2010052014, particularly in the sequence listing, which is hereby incorporated by reference.
   (iv) The combination product for the treatment and optionally also/preferably for the prevention, prophylaxis, or reduction of adverse events associated with immunotherapy, particularly cancer immunotherapy of leukemia, particularly of acute lymphoblastic leukemia (ALL), with an antibody construct comprising at least one domain which binds to CD19 on the surface of a target cell, and at least one other domain which binds to CD3, preferably human CD3, on the surface of a T cell according to embodiment (i) to (iii) of Sub-Aspect A-1), comprising
[0041] (a) at least one antibody construct referred to in the preamble, and
[0042] (b) an inhibitor/antagonist of TNF/TNFR that reduces TNF/TNFR signaling,
   wherein said inhibitor/antagonist of TNF/TNFR that reduces TNF/TNFR signaling referred to in (b) is for administration to a patient prior to and optionally also following administration of said antibody construct referred to in (a), wherein the domain which binds to CD19 comprises a VL region comprising CDR-L1, CDR-L2 and CDR-L3, wherein CDR-L1 as depicted in SEQ ID NO:314, CDR-L2 as depicted in SEQ ID NO: 315, and CDR-L3 as depicted in SEQ ID NO: 316.
   (v) The combination product for the treatment and optionally also/preferably for the prevention, prophylaxis, or reduction of adverse events associated with immunotherapy, particularly cancer immunotherapy of leukemia, particularly of acute lymphoblastic leukemia (ALL), with an antibody construct comprising at least one domain which binds to CD19 on the surface of a target cell, and at least one other domain which binds to CD3, preferably human CD3, on the surface of a T cell according to embodiment (i) to (iv) of Sub-Aspect A-1), comprising
[0043] (a) at least one antibody construct referred to in the preamble, and
[0044] (b) an inhibitor/antagonist of TNF/TNFR that reduces TNF/TNFR signaling,
   wherein said inhibitor/antagonist of TNF/TNFR that reduces TNF/TNFR signaling referred to in (b) is for administration to a patient prior to and optionally also following administration of said antibody construct referred to in (a), wherein the domain which binds to CD19 comprises a VH region comprising CDR-H1, CDR-H2 and CDR-H3 selected from: CDR-H1 as depicted in SEQ ID NO: 310, CDR-H2 as depicted in SEQ ID NO: 312, and CDR-H3 as depicted in SEQ ID NO: 313; CDR-H1 as depicted in SEQ ID NO: 311, CDR-H2 as depicted in SEQ ID NO: 312, and CDR-H3 as depicted in SEQ ID NO: 313.
   (vi) The combination product for the treatment and optionally also/preferably for the prevention, prophylaxis, or reduction of adverse events associated with immunotherapy, particularly cancer immunotherapy of leukemia, particularly of acute lymphoblastic leukemia (ALL), with an antibody construct comprising at least one domain which binds to CD19 on the surface of a target cell, and at least one other domain which binds to CD3, preferably human CD3, on the surface of a T cell according to embodiment (i) to (v) of Sub-Aspect A-1), comprising
[0045] (a) at least one antibody construct referred to in the preamble, and
[0046] (b) an inhibitor/antagonist of TNF/TNFR that reduces TNF/TNFR signaling,
   wherein said inhibitor/antagonist of TNF/TNFR that reduces TNF/TNFR signaling referred to in (b) is for administration to a patient prior to and optionally also following administration of said antibody construct referred to in (a), wherein the domain which binds to CD19 comprises a VL region comprising CDR-L1, CDR-L2 and CDR-L3 and a VH region comprising CDR-H1, CDR-H2 and CDR-H3 selected from: CDR-L1 as depicted in SEQ ID NO:314, CDR-L2 as depicted in SEQ ID NO: 315, and CDR-L3 as depicted in SEQ ID NO: 316, CDR-H1 as depicted in SEQ ID NO: 310, CDR-H2 as depicted in SEQ ID NO: 312, and CDR-H3 as depicted in SEQ ID NO: 313; and CDR-L1 as depicted in SEQ ID NO:314, CDR-L2 as depicted in SEQ ID NO: 315, and CDR-L3 as depicted in SEQ ID NO: 316, CDR-H1 as depicted in SEQ ID NO: 311, CDR-H2 as depicted in SEQ ID NO: 312, and CDR-H3 as depicted in SEQ ID NO: 313.
   (vii) The combination product for the treatment and optionally also/preferably for the prevention, prophylaxis, or reduction of adverse events associated with immunotherapy, particularly cancer immunotherapy of leukemia, particularly of acute lymphoblastic leukemia (ALL), with an antibody construct comprising at least one domain which binds to CD19 on the surface of a target cell, and at least one other domain which binds to CD3, preferably human CD3, on the surface of a T cell according to embodiment (i) to (vi) of Sub-Aspect A-1), comprising
[0047] (a) at least one antibody construct referred to in the preamble, and
[0048] (b) an inhibitor/antagonist of TNF/TNFR that reduces TNF/TNFR signaling,
   wherein said inhibitor/antagonist of TNF/TNFR that reduces TNF/TNFR signaling referred to in (b) is for administration to a patient prior to and optionally also following administration of said antibody construct referred to in (a), wherein the domain which binds to CD19 comprises a VL region as depicted in SEQ ID NO: 309.
   (viii) The combination product for the treatment and optionally also/preferably for the prevention, prophylaxis, or reduction of adverse events associated with immunotherapy, particularly cancer immunotherapy of leukemia, particularly of acute lymphoblastic leukemia (ALL), with an antibody construct comprising at least one domain which binds to CD19 on the surface of a target cell, and at least one other domain which binds to CD3, preferably human CD3, on the surface of a T cell according to embodiment (i) to (vii) of Sub-Aspect A-1), comprising
[0049] (a) at least one antibody construct referred to in the preamble, and
[0050] (b) an inhibitor/antagonist of TNF/TNFR that reduces TNF/TNFR signaling,
   wherein said inhibitor/antagonist of TNF/TNFR that reduces TNF/TNFR signaling referred to in (b) is for administration to a patient prior to and optionally also following administration of said antibody construct referred to in (a), wherein the domain which binds to CD19 comprises a VH region as depicted in any one of SEQ ID NO: 308.
   (ix) The combination product for the treatment and optionally also/preferably for the prevention, prophylaxis, or reduction of adverse events associated with immunotherapy, particularly cancer immunotherapy of leukemia, particularly of acute lymphoblastic leukemia (ALL), with an antibody construct comprising at least one domain which binds to CD19 on the surface of a target cell, and at least one other domain which binds to CD3, preferably human CD3, on the surface of a T cell according to embodiment (i) to (viii) of Sub-Aspect A-1), comprising
[0051] (a) at least one antibody construct referred to in the preamble, and
[0052] (b) an inhibitor/antagonist of TNF/TNFR that reduces TNF/TNFR signaling,
   wherein said inhibitor/antagonist of TNF/TNFR that reduces TNF/TNFR signaling referred to in (b) is for administration to a patient prior to and optionally also following administration of said antibody construct referred to in (a), wherein the domain which binds to CD19 comprises a VL region and a VH region consisting a VL region as depicted in SEQ ID NO: 309 and a VH region as depicted in SEQ ID NO: 308.
   (x) The combination product for the treatment and optionally also/preferably for the prevention, prophylaxis, or reduction of adverse events associated with immunotherapy, particularly cancer immunotherapy of leukemia, particularly of acute lymphoblastic leukemia (ALL), with an antibody construct comprising at least one domain which binds to CD19 on the surface of a target cell, and at least one other domain which binds to CD3, preferably human CD3, on the surface of a T cell according to embodiment (i) to (ix) of Sub-Aspect A-1), comprising
[0053] (a) at least one antibody construct referred to in the preamble, and
[0054] (b) an inhibitor/antagonist of TNF/TNFR that reduces TNF/TNFR signaling,
   wherein said inhibitor/antagonist of TNF/TNFR that reduces TNF/TNFR signaling referred to in (b) is for administration to a patient prior to and optionally also following administration of said antibody construct referred to in (a), wherein the first domain, which binds to CD19, competes for binding to CD19 with an antibody construct in accordance with the present invention that is characterized by a domain which binds to CD19 comprising a VL region and a VH region consisting a VL region as depicted in SEQ ID NO: 309 and a VH region as depicted in SEQ ID NO: 308, or with an antibody construct having a domain which binds to CD19 comprises a VL region comprising CDR-L1, CDR-L2 and CDR-L3 and a VH region comprising CDR-H1, CDR-H2 and CDR-H3 selected from: CDR-L1 as depicted in SEQ ID NO:314, CDR-L2 as depicted in SEQ ID NO: 315, and CDR-L3 as depicted in SEQ ID NO: 316, CDR-H1 as depicted in SEQ ID NO: 310, CDR-H2 as depicted in SEQ ID NO: 312, and CDR-H3 as depicted in SEQ ID NO: 313; and CDR-L1 as depicted in SEQ ID NO:314, CDR-L2 as depicted in SEQ ID NO: 315, and CDR-L3 as depicted in SEQ ID NO: 316, CDR-H1 as depicted in SEQ ID NO: 311, CDR-H2 as depicted in SEQ ID NO: 312, and CDR-H3 as depicted in SEQ ID NO: 313.

### Sub-Aspect A-2—Constructs Binding CD33 in Combination Products of the Invention

[0055] In accordance with the present invention, antibody constructs binding to CD3 and CD33 comprise those exemplified in WO2008119567; in Example 23, and particularly in Example 36, and respective sequences in the Sequence Listing all of which are hereby incorporated by reference.

[0056] The functionality of cross-species specific bispecific antibody constructs regarding the capability to bind to human and macaque CD33 and CD3, respectively, may be determined by FACS analysis as described in WO2008119567.

[0057] CHO cells transfected with CD33, preferably human CD33 as described in Example 23.1 in WO2008119567 and the CD3, preferably human CD3, positive T cell leukemia cell line HPB-ALL (DSMZ, Braunschweig, ACC483) may be used to test the binding to human target antigens. The binding reactivity to macaque antigens may be tested by using the generated macaque CD33 transfectant as described in Example 23.2 in WO2008119567 and macaque PBMC. Flow cytometry can be performed as described in WO2008119567 to acquire and analyze the data. FACS staining and measuring of the fluorescence intensity can be performed as described in Current Protocols in Immunology (Coligan, Kruisbeek, Margulies, Shevach and Strober, Wiley-Interscience, 2002).

[0058] The bispecific binding of single chain molecules, which are cross-species specific for CD33 and cross-species specific for human and non-chimpanzee primate CD3 may be determined as in WO2008119567. Bioactivity of the generated bispecific single chain antibodies can be analyzed by chromium 51 (51Cr) release in vitro cytotoxicity assays using the CD33 positive cell lines described in Examples 36, 23.1 and 23.2 as described in WO2008119567. As shown in WO2008119567, cross-species specific bispecific single chain antibody constructs demonstrate cytotoxic activity against human CD33 positive target cells elicited by stimulated human CD4/CD56 depleted PBMC and against macaque CD33 positive target cells elicited by the macaque T cell line 4119LnPx.

[0059] Further, as used herein, the term “compete for binding” means, that the binding of the explicitly defined antibodies in the above paragraphs of this sub-aspect is reduced by competition by a competition antibody that binds to CD33, preferably to an epitope that is bound by any of the above explicitly defined antibodies. The competition antibodies may have VL and/or VH regions that differ in their amino acid sequence(s) from the explicitly described antibodies, when both, the competition antibodies and the explicitly described antibodies are co-incubated in a competition assay with target cells that express CD33, wherein both, competition antibody and explicitly defined antibody are used at equimolar concentrations in such competition assays. The competition antibody may be labelled (the explicitly defined antibody may be unlabeled or differently labelled to permit a quantification) to distinguish the number of competition antibody bound to the target antigen at the end of the competition binding assay method. The amount/number of competition antibody that binds under such circumstances to the target should be at least 50%, at least 60%, at least 70%, at least 80%, at least 90%, preferably at least 95% of all antibodies selectively binding to the target antigen. The competition antibody may comprise one or more, e.g., at least 2, 3, 4, 5, 6, 7, 8, 9, 10, 11, 12, 13, 14, 15, 16, 17, 18, 19, 20 or even more amino acid residues that are different from the explicitly disclosed antibodies. In preferred aspects of the invention, the competition antibodies have at least 1, 2, 3, 4, 5, 6, 7, 8, 9, 10, or more amino acid residues that are different from the herein described antibodies characterized by a domain which binds to CD33 comprising a VL region and a VH region as defined herein below:

[0060] It is envisaged for the antibody construct used in accordance with the present invention that the domain which selectively binds to CD33 comprises a VL region comprising CDR-L1, CDR-L2 and CDR-L3 selected from: CDR-L1 as depicted in SEQ ID NO: 317, CDR-L2 as depicted in SEQ ID NO: 318, and CDR-L3 as depicted in SEQ ID NO: 319; CDR-L1 as depicted in SEQ ID NO: 320, CDR-L2 as depicted in SEQ ID NO: 318, and CDR-L3 as depicted in SEQ ID NO: 319; CDR-L1 as depicted in SEQ ID NO: 317, CDR-L2 as depicted in SEQ ID NO: 321, and CDR-L3 as depicted in SEQ ID NO: 319; and CDR-L1 as depicted in SEQ ID NO: 322, CDR-L2 as depicted in SEQ ID NO: 318, and CDR-L3 as depicted in SEQ ID NO: 319.

[0061] It is also envisaged for the antibody construct used in accordance with the present invention that the domain which selectively binds to CD33 comprises a VH region comprising CDR-H1, CDR-H2 and CDR-H3 selected from: CDR-H1 as depicted in SEQ ID NO: 323, CDR-H2 as depicted in SEQ ID NO: 324, and CDR-H3 as depicted in SEQ ID NO: 325; CDR-H1 as depicted in SEQ ID NO: 323, CDR-H2 as depicted in SEQ ID NO: 326, and CDR-H3 as depicted in SEQ ID NO: 325; and CDR-H1 as depicted in SEQ ID NO: 323; CDR-H2 as depicted in SEQ ID NO: 327, and CDR-H3 as depicted in SEQ ID NO: 325.

[0062] It is envisaged for the antibody construct used in accordance with the present invention that the domain which selectively binds to CD33 comprises a VL region selected from the group of VL regions comprising those depicted in any one of SEQ ID NOs 328, 329, 330, 331, and 332.

[0063] It is also envisaged that the domain which selectively binds to CD33 comprises a VH region selected from the group consisting of a VH regions comprising those depicted in any one of SEQ ID Nos. 333, 334, 335, 336, 337, 338 and 339.

[0064] More preferably, the antibody construct used in accordance with the present invention is characterized by the domain which binds to CD33 comprising a VL region and a VH region selected from the group comprising pairs of a VL region and a VH region as depicted in SEQ ID Nos: 328+333, 328+334, 328+335, 328+336, 328+337, 328+338, 328+339, 329+333, 329+334, 329+335, 329+336, 329+337, 329+338, 329+339, 330+333, 330+334, 330+335, 330+336, 330+337, 330+338, 330+339, 331+333, 331+333, 331+334, 331+335, 331+336, 331+337, 331+338, 331+339, 332+333, 332+334, 332+335, 332+336, 332+337, 332+338, and 332+339.

[0065] It is also envisaged for the antibody construct used in accordance with the present invention that the domain, which selectively binds to an epitope of CD33, comprises CDR-L1, CDR-L2 and CDR-L3 and CDR-H1, CDR-H2 and CDR-H3 as depicted in the following groups of sequences: CDR-L1 as depicted in SEQ ID NO: 317, CDR-L2 as depicted in SEQ ID NO: 318, CDR-L3 as depicted in SEQ ID NO: 319, and CDR-H1 as depicted in SEQ ID NO: 323, CDR-H2 as depicted in SEQ ID NO: 324, and CDR-H3 as depicted in SEQ ID NO: 325; CDR-L1 as depicted in SEQ ID NO: 320, CDR-L2 as depicted in SEQ ID NO: 318, CDR-L3 as depicted in SEQ ID NO: 319, and CDR-H1 as depicted in SEQ ID NO: 323, CDR-H2 as depicted in SEQ ID NO: 324, and CDR-H3 as depicted in SEQ ID NO: 325; CDR-L1 as depicted in SEQ ID NO: 317, CDR-L2 as depicted in SEQ ID NO: 321, CDR-L3 as depicted in SEQ ID NO: 319; and CDR-H1 as depicted in SEQ ID NO: 323, CDR-H2 as depicted in SEQ ID NO: 324, and CDR-H3 as depicted in SEQ ID NO: 325; CDR-L1 as depicted in SEQ ID NO: 322, CDR-L2 as depicted in SEQ ID NO: 318, CDR-L3 as depicted in SEQ ID NO: 319, and CDR-H1 as depicted in SEQ ID NO: 323, CDR-H2 as depicted in SEQ ID NO: 324, and CDR-H3 as depicted in SEQ ID NO: 325; CDR-L1 as depicted in SEQ ID NO: 317, CDR-L2 as depicted in SEQ ID NO: 318, CDR-L3 as depicted in SEQ ID NO: 319, and CDR-H1 as depicted in SEQ ID NO: 323, CDR-H2 as depicted in SEQ ID NO: 326, and CDR-H3 as depicted in SEQ ID NO: 325; CDR-L1 as depicted in SEQ ID NO: 320, CDR-L2 as depicted in SEQ ID NO: 318, CDR-L3 as depicted in SEQ ID NO: 319, and CDR-H1 as depicted in SEQ ID NO: 323, CDR-H2 as depicted in SEQ ID NO: 326, and CDR-H3 as depicted in SEQ ID NO: 325; CDR-L1 as depicted in SEQ ID NO: 317, CDR-L2 as depicted in SEQ ID NO: 321, CDR-L3 as depicted in SEQ ID NO: 319; and CDR-H1 as depicted in SEQ ID NO: 323, CDR-H2 as depicted in SEQ ID NO: 326, and CDR-H3 as depicted in SEQ ID NO: 325; CDR-L1 as depicted in SEQ ID NO: 322, CDR-L2 as depicted in SEQ ID NO: 318, CDR-L3 as depicted in SEQ ID NO: 319, and CDR-H1 as depicted in SEQ ID NO: 323, CDR-H2 as depicted in SEQ ID NO: 326, and CDR-H3 as depicted in SEQ ID NO: 325; CDR-L1 as depicted in SEQ ID NO: 317, CDR-L2 as depicted in SEQ ID NO: 318, CDR-L3 as depicted in SEQ ID NO: 319, and CDR-H1 as depicted in SEQ ID NO: 323; CDR-H2 as depicted in SEQ ID NO: 327, and CDR-H3 as depicted in SEQ ID NO: 325; CDR-L1 as depicted in SEQ ID NO: 320, CDR-L2 as depicted in SEQ ID NO: 318, CDR-L3 as depicted in SEQ ID NO: 319, and CDR-H1 as depicted in SEQ ID NO: 323; CDR-H2 as depicted in SEQ ID NO: 327, and CDR-H3 as depicted in SEQ ID NO: 325; CDR-L1 as depicted in SEQ ID NO: 317, CDR-L2 as depicted in SEQ ID NO: 321, CDR-L3 as depicted in SEQ ID NO: 319; and CDR-H1 as depicted in SEQ ID NO: 323; CDR-H2 as depicted in SEQ ID NO: 327, and CDR-H3 as depicted in SEQ ID NO: 325; CDR-L1 as depicted in SEQ ID NO: 322, CDR-L2 as depicted in SEQ ID NO: 318, CDR-L3 as depicted in SEQ ID NO: 319, and CDR-H1 as depicted in SEQ ID NO: 323; CDR-H2 as depicted in SEQ ID NO: 327, and CDR-H3 as depicted in SEQ ID NO: 325.

[0066] It is also envisaged for the antibody construct used in accordance with the present invention that the domain which selectively binds to an epitope of CD33 comprises a VL region comprising CDR-L1, CDR-L2 and CDR-L3 and a VH region comprising CDR-H1, CDR-H2 and CDR-H3 selected from the pairs of VL and VH regions: 328+333, 328+334, 328+335, 328+336, 328+337, 328+338, 328+339, 329+333, 329+334, 329+335, 329+336, 329+337, 329+338, 329+339, 330+333, 330+334, 330+335, 330+336, 330+337, 330+338, 330+339, 331+333, 331+333, 331+334, 331+335, 331+336, 331+337, 331+338, 331+339, 332+333, 332+334, 332+335, 332+336, 332+337, 332+338, and 332+339.

[0067] It is also envisaged for the antibody construct used in accordance with the present invention that the domain which selectively binds to an epitope of CD33 competes with those explicitly recited herein, i.e. those characterized by specific SEQ ID Nos. referred to above. Whether or not an antibody construct binds to the same epitope of CD33 as another given antibody construct can be measured e.g. by epitope mapping with chimeric or truncated target molecules, e.g. as described herein above and in the Examples in WO2017021362.

[0068] Further, whether an antibody construct competes for binding with another given antibody construct can be measured in a competition assay such as a competitive ELISA or a cell-based competition assay. Avidin-coupled microparticles (beads) can also be used. Like an avidin-coated ELISA plate, when reacted with a biotinylated protein, each of these beads can be used as a substrate on which an assay can be performed. Antigen is coated onto a bead and then precoated with the first antibody. The second antibody is added, and any additional binding is determined. Possible means for the read-out include flow cytometry.

(i) Accordingly, the combination product for the treatment and optionally also/preferably for the prevention, prophylaxis, or reduction of adverse events associated with immunotherapy, particularly cancer immunotherapy, particularly of a leukemia, such as AML, with an antibody construct comprising at least one domain (also referred to as “first domain”) which binds to a target antigen on the surface of a target cell, and at least one other domain (also referred to as “second domain”) which binds to CD3, preferably human CD3, on the surface of a T cell according to any one of embodiments (i) to (xiv), of Aspect A) comprising
[0069] (a) at least one antibody construct referred to in the preamble, and
[0070] (b) an inhibitor/antagonist of TNF/TNFR that reduces TNF/TNFR signaling,
   wherein said inhibitor/antagonist of TNF/TNFR that reduces TNF/TNFR signaling referred to in (b) is for administration to a patient prior to and optionally also following administration of said antibody construct referred to in (a), and optionally also for administration following the administration of said antibody construct, wherein the first domain binds selectively to CD33.
   (ii) The combination product for the treatment and optionally also/preferably for the prevention, prophylaxis, or reduction of adverse events associated with immunotherapy, particularly cancer immunotherapy, particularly of a leukemia, such as AML, with an antibody construct comprising at least one domain which binds to a CD33 on the surface of a target cell, and at least one other domain which binds to CD3, preferably human CD3, on the surface of a T cell according to embodiment (i) of Sub-Aspect A-2), comprising
[0071] (a) at least one antibody construct referred to in the preamble, and
[0072] (b) an inhibitor/antagonist of TNF/TNFR that reduces TNF/TNFR signaling,
   wherein said inhibitor/antagonist of TNF/TNFR that reduces TNF/TNFR signaling referred to in (b) is for administration to a patient prior to and optionally also following administration of said antibody construct referred to in (a), and optionally also after administration of said antibody construct, wherein said antibody construct binds to an epitope of CD33 that is selectively bound by an antibody/antibody construct that has the following CDRs of the VH chain and/or VL chain selected from the group comprising a VL region comprising CDR-L1, CDR-L2 and CDR-L3 selected from: CDR-L1 as depicted in SEQ ID NO: 317, CDR-L2 as depicted in SEQ ID NO: 318, and CDR-L3 as depicted in SEQ ID NO: 319; CDR-L1 as depicted in SEQ ID NO: 320, CDR-L2 as depicted in SEQ ID NO: 318, and CDR-L3 as depicted in SEQ ID NO: 319; CDR-L1 as depicted in SEQ ID NO: 317, CDR-L2 as depicted in SEQ ID NO: 321, and CDR-L3 as depicted in SEQ ID NO: 319; CDR-L1 as depicted in SEQ ID NO: 322, CDR-L2 as depicted in SEQ ID NO: 318, and CDR-L3 as depicted in SEQ ID NO: 319; and a VH region comprising CDR-H1, CDR-H2 and CDR-H3 selected from CDR-H1 as depicted in SEQ ID NO: 323, CDR-H2 as depicted in SEQ ID NO: 324, and CDR-H3 as depicted in SEQ ID NO: 325; CDR-H1 as depicted in SEQ ID NO: 323, CDR-H2 as depicted in SEQ ID NO: 326, and CDR-H3 as depicted in SEQ ID NO: 325; and CDR-H1 as depicted in SEQ ID NO: 323; CDR-H2 as depicted in SEQ ID NO: 327, and CDR-H3 as depicted in SEQ ID NO: 325.
   (iii) The combination product for the treatment and optionally also/preferably for the prevention, prophylaxis, or reduction of adverse events associated with immunotherapy, particularly cancer immunotherapy, particularly of a leukemia, such as AML, with an antibody construct comprising at least one domain which binds to a CD33 on the surface of a target cell, and at least one other domain which binds to CD3, preferably human CD3, on the surface of a T cell according to embodiment (i) or (ii) of Sub-Aspect A-2), comprising
[0073] (a) at least one antibody construct referred to in the preamble, and
[0074] (b) an inhibitor/antagonist of TNF/TNFR that reduces TNF/TNFR signaling,
   wherein said inhibitor/antagonist of TNF/TNFR that reduces TNF/TNFR signaling referred to in (b) is for administration to a patient prior to and optionally also following administration of said antibody construct referred to in (a), wherein said antibody construct binds to CD33 that is selectively bound by an antibody/antibody construct that comprises the following VL chain regions selected from the group of VL chain regions as depicted in any one of SEQ ID NOs 328, 329, 330, 331, and 332.
   (iv) The combination product for the treatment and optionally also/preferably for the prevention, prophylaxis, or reduction of adverse events associated with immunotherapy, particularly cancer immunotherapy, particularly of a leukemia, such as AML, with an antibody construct comprising at least one domain which binds to a CD33 on the surface of a target cell, and at least one other domain which binds to CD3, preferably human CD3, on the surface of a T cell according to embodiment (i) to (iii) of Sub-Aspect A-2), comprising
[0075] (a) at least one antibody construct referred to in the preamble, and
[0076] (b) an inhibitor/antagonist of TNF/TNFR that reduces TNF/TNFR signaling,
   wherein said inhibitor/antagonist of TNF/TNFR that reduces TNF/TNFR signaling referred to in (b) is for administration to a patient prior to and optionally also following administration of said antibody construct referred to in (a), wherein said antibody construct binds to CD33 that is selectively bound by an antibody/antibody construct that comprises the following VH chain regions selected from the group of VH chain regions as depicted in any one of SEQ ID Nos. 333, 334, 335, 336, 337, 338 and 339.
   (v) The combination product for the treatment and optionally also/preferably for the prevention, prophylaxis, or reduction of adverse events associated with immunotherapy, particularly cancer immunotherapy, particularly of a leukemia, such as AML, with an antibody construct comprising at least one domain which binds to a CD33 on the surface of a target cell, and at least one other domain which binds to CD3, preferably human CD3, on the surface of a T cell according to embodiment (i) to (iv) of Sub-Aspect A-2), comprising
[0077] (a) at least one antibody construct referred to in the preamble, and
[0078] (b) an inhibitor/antagonist of TNF/TNFR that reduces TNF/TNFR signaling,
   wherein said inhibitor/antagonist of TNF/TNFR that reduces TNF/TNFR signaling referred to in (b) is for administration to a patient prior to and optionally also following administration of said antibody construct referred to in (a), wherein said domain binding to CD33 comprises a VL region and a VH region selected from the group of pairs of a VL region and a VH region comprising those depicted in SEQ ID Nos: 328+333, 328+334, 328+335, 328+336, 328+337, 328+338, 328+339, 329+333, 329+334, 329+335, 329+336, 329+337, 329+338, 329+339, 330+333, 330+334, 330+335, 330+336, 330+337, 330+338, 330+339, 331+333, 331+333, 331+334, 331+335, 331+336, 331+337, 331+338, 331+339, 332+333, 332+334, 332+335, 332+336, 332+337, 332+338, and 332+339.
   (vi) The combination product for the treatment and optionally also/preferably for the prevention, prophylaxis, or reduction of adverse events associated with immunotherapy, particularly cancer immunotherapy, particularly of a leukemia, such as AML, with an antibody construct comprising at least one domain which binds to a CD33 on the surface of a target cell, and at least one other domain which binds to CD3, preferably human CD3, on the surface of a T cell according to embodiment (i) to (v) of Sub-Aspect A-2), comprising
[0079] (a) at least one antibody construct referred to in the preamble, and
[0080] (b) an inhibitor/antagonist of TNF/TNFR that reduces TNF/TNFR signaling,
   wherein said inhibitor/antagonist of TNF/TNFR that reduces TNF/TNFR signaling referred to in (b) is for administration to a patient prior to and optionally also following administration of said antibody construct referred to in (a), wherein said domain binding to CD33 comprises CDR-L1, CDR-L2 and CDR-L3 and CDR-H1, CDR-H2 and CDR-H3 as depicted in the following groups of sequences: CDR-L1 as depicted in SEQ ID NO: 317, CDR-L2 as depicted in SEQ ID NO: 318, CDR-L3 as depicted in SEQ ID NO: 319, and CDR-H1 as depicted in SEQ ID NO: 323, CDR-H2 as depicted in SEQ ID NO: 324, and CDR-H3 as depicted in SEQ ID NO: 325; CDR-L1 as depicted in SEQ ID NO: 320, CDR-L2 as depicted in SEQ ID NO: 318, CDR-L3 as depicted in SEQ ID NO: 319, and CDR-H1 as depicted in SEQ ID NO: 323, CDR-H2 as depicted in SEQ ID NO: 324, and CDR-H3 as depicted in SEQ ID NO: 325; CDR-L1 as depicted in SEQ ID NO: 317, CDR-L2 as depicted in SEQ ID NO: 321, CDR-L3 as depicted in SEQ ID NO: 319; and CDR-H1 as depicted in SEQ ID NO: 323, CDR-H2 as depicted in SEQ ID NO: 324, and CDR-H3 as depicted in SEQ ID NO: 325; CDR-L1 as depicted in SEQ ID NO: 322, CDR-L2 as depicted in SEQ ID NO: 318, CDR-L3 as depicted in SEQ ID NO: 319, and CDR-H1 as depicted in SEQ ID NO: 323, CDR-H2 as depicted in SEQ ID NO: 324, and CDR-H3 as depicted in SEQ ID NO: 325; CDR-L1 as depicted in SEQ ID NO: 317, CDR-L2 as depicted in SEQ ID NO: 318, CDR-L3 as depicted in SEQ ID NO: 319, and CDR-H1 as depicted in SEQ ID NO: 323, CDR-H2 as depicted in SEQ ID NO: 326, and CDR-H3 as depicted in SEQ ID NO: 325; CDR-L1 as depicted in SEQ ID NO: 320, CDR-L2 as depicted in SEQ ID NO: 318, CDR-L3 as depicted in SEQ ID NO: 319, and CDR-H1 as depicted in SEQ ID NO: 323, CDR-H2 as depicted in SEQ ID NO: 326, and CDR-H3 as depicted in SEQ ID NO: 325; CDR-L1 as depicted in SEQ ID NO: 317, CDR-L2 as depicted in SEQ ID NO: 321, CDR-L3 as depicted in SEQ ID NO: 319; and CDR-H1 as depicted in SEQ ID NO: 323, CDR-H2 as depicted in SEQ ID NO: 326, and CDR-H3 as depicted in SEQ ID NO: 325; CDR-L1 as depicted in SEQ ID NO: 322, CDR-L2 as depicted in SEQ ID NO: 318, CDR-L3 as depicted in SEQ ID NO: 319, and CDR-H1 as depicted in SEQ ID NO: 323, CDR-H2 as depicted in SEQ ID NO: 326, and CDR-H3 as depicted in SEQ ID NO: 325; CDR-L1 as depicted in SEQ ID NO: 317, CDR-L2 as depicted in SEQ ID NO: 318, CDR-L3 as depicted in SEQ ID NO: 319, and CDR-H1 as depicted in SEQ ID NO: 323; CDR-H2 as depicted in SEQ ID NO: 327, and CDR-H3 as depicted in SEQ ID NO: 325; CDR-L1 as depicted in SEQ ID NO: 320, CDR-L2 as depicted in SEQ ID NO: 318, CDR-L3 as depicted in SEQ ID NO: 319, and CDR-H1 as depicted in SEQ ID NO: 323; CDR-H2 as depicted in SEQ ID NO: 327, and CDR-H3 as depicted in SEQ ID NO: 325; CDR-L1 as depicted in SEQ ID NO: 317, CDR-L2 as depicted in SEQ ID NO: 321, CDR-L3 as depicted in SEQ ID NO: 319; and CDR-H1 as depicted in SEQ ID NO: 323; CDR-H2 as depicted in SEQ ID NO: 327, and CDR-H3 as depicted in SEQ ID NO: 325; CDR-L1 as depicted in SEQ ID NO: 322, CDR-L2 as depicted in SEQ ID NO: 318, CDR-L3 as depicted in SEQ ID NO: 319, and CDR-H1 as depicted in SEQ ID NO: 323; CDR-1-12 as depicted in SEQ ID NO: 327, and CDR-H3 as depicted in SEQ ID NO: 325.
   (vii) The combination product for the treatment and optionally also/preferably for the prevention, prophylaxis, or reduction of adverse events associated with immunotherapy, particularly cancer immunotherapy, particularly of a leukemia, such as AML, with an antibody construct comprising at least one domain which binds to a CD33 on the surface of a target cell, and at least one other domain which binds to CD3, preferably human CD3, on the surface of a T cell according to embodiment (i) to (vi) of Sub-Aspect A-2), comprising
[0081] (a) at least one antibody construct referred to in the preamble, and
[0082] (b) an inhibitor/antagonist of TNF/TNFR that reduces TNF/TNFR signaling,
   wherein said inhibitor/antagonist of TNF/TNFR that reduces TNF/TNFR signaling referred to in (b) is for administration to a patient prior to and optionally also following administration of said antibody construct referred to in (a), wherein said domain binding to CD33 comprises a VL region comprises CDR-L1, CDR-L2 and CDR-L3 and a VH region comprising CDR-H1, CDR-H2 and CDR-H3 comprised by those of the pairs of SEQ ID NOs: 328+333, 328+334, 328+335, 328+336, 328+337, 328+338, 328+339, 329+333, 329+334, 329+335, 329+336, 329+337, 329+338, 329+339, 330+333, 330+334, 330+335, 330+336, 330+337, 330+338, 330+339, 331+333, 331+333, 331+334, 331+335, 331+336, 331+337, 331+338, 331+339, 332+333, 332+334, 332+335, 332+336, 332+337, 332+338, and 332+339.
   (viii) The combination product for the treatment and optionally also/preferably for the prevention, prophylaxis, or reduction of adverse events associated with immunotherapy, particularly cancer immunotherapy, particularly of a leukemia, such as AML, with an antibody construct comprising at least one domain which binds to a CD33 on the surface of a target cell, and at least one other domain which binds to CD3, preferably human CD3, on the surface of a T cell according to embodiment (i) to (vii) of Sub-Aspect A-2), comprising
[0083] (a) at least one antibody construct referred to in the preamble, and
[0084] (b) an inhibitor/antagonist of TNF/TNFR that reduces TNF/TNFR signaling,
   wherein said inhibitor/antagonist of TNF/TNFR that reduces TNF/TNFR signaling referred to in (b) is for administration to a patient prior to and optionally also following administration of said antibody construct referred to in (a), wherein the first domain which binds to CD33 competes for binding to CD33 with an antibody construct as defined in any one of embodiments (i) to (vii) of Sub-Aspect A-2).

### Sub-Aspect A-3—Constructs Binding FLT3 in Combination Products of the Invention

[0085] In accordance with the present invention, antibody constructs binding to CD3 and FLT3 comprise those exemplified in WO2017021362, the contents of which are hereby incorporated by reference.

[0086] Fms-like tyrosine kinase 3 (FLT3) also known as fetal liver kinase 2 (FLK-2), human stem cell kinase 1 (SCK-1) or Cluster of Differentiation antigen (CD135) is a hematopoietic receptor tyrosine kinase that was cloned by two independent groups in the 1990s. The FLT3 gene, located on chromosome 13q12 in humans encodes a Class III receptor tyrosine kinase protein that shares homology with other Class III family members including stem cell factor receptor (c-KIT), macrophage colony-stimulating factor receptor (FMS) and platelet-derived growth factor receptor (PDGFR). Human FLT3 is expressed in CD34+CD38-hematopoietic stem cells (HSC) as well as in a subset of dendritic precursor cells. The most common FLT3 mutation in Acute Myeloid Leukemia (AML) is the FLT3 internal tandem duplication (FLT3-ITD) that is found in 20 to 38% of patients with cytogenetically normal AML. FLT3-ITDs are formed when a portion of the juxtamembrane domain coding sequence gets duplicated and inserted in a head to tail orientation. FLT3 mutations have not been identified in patients with chronic lymphoid leukemia (CLL), non-Hodgkin's lymphoma and multiple myeloma suggesting strong disease specificity for AML. Mutant FLT3 activation is generally observed across all FAB subtypes, however, it is significantly increased in AML patients with FAB M5 (monocytic leukemia), while FAB subtypes M2 and M6 (granulocytic or erythroid leukemia) are significantly less frequently associated with FLT3 activation, in line with normal expression patterns of FLT3. A small percentage of AML patients (5-7%) present with single amino acid mutations in the FLT3 tyrosine kinase domain (FLT3 TKD), most commonly at D835 or in some cases at T842 or 1836 while even fewer patients (˜1%) harbor mutations in the FLT3 juxtamembrane domain involving residues 579, 590, 591 and 594. Patients with FLT3-ITD mutant AML have an aggressive form of disease characterized by early relapse and poor survival, while overall survival and event-free survival are not significantly influenced by presence of FLT3-TKD mutations. Furthermore, AML patients with FLT3-ITD mutation with concurrent TET2 or DNMT3A mutations have an unfavorable overall risk profile compared to FLT3-ITD mutant AML patients with wild-type TET2 or DNMT3A underscoring the clinical and biological heterogeneity of AML. The selective FLT3-targeting antibody domains disclosed in WO2017021362 are also subject matter of the present invention.

[0087] Accordingly, antibody constructs used in combination products, kits, or used in methods according to the present invention comprise a first binding domain which binds to human FLT3 on the surface of a target cell and a second binding domain which binds to CD3, preferably human CD3, on the surface of a T cell, wherein the first binding domain binds to an epitope of FLT3 which is comprised within the region of the human FLT3 having a sequence as depicted in SEQ ID NO: 814 (cluster 1) or SEQ ID NO: 816 (cluster 3) that are disclosed in WO2017021362.

[0088] Therefore, the first binding domain of the antibody constructs in combination according to this aspect of the present invention comprises a VH region comprising CDR-H1, CDR-H2 and CDR-H3 and a VL region comprising CDR-L1, CDR-L2 and CDR-L3 selected from the group comprising: 341-346, SEQ ID NOs: 351-356, SEQ ID NOs: 361-366, SEQ ID NOs: 371-376, SEQ ID NOs: 381-386, SEQ ID NOs: 391-396, SEQ ID NOs: 401-406, SEQ ID NOs: 411-416, SEQ ID NOs: 421-426, SEQ ID NOs: 431-436, SEQ ID NOs: 441-446, SEQ ID NOs: 451-456, SEQ ID NOs: 461-466, SEQ ID NOs: 471-476, SEQ ID NOs: 481-486, SEQ ID NOs: 491-496, SEQ ID NOs: 501-506, SEQ ID NOs: 511-516, SEQ ID NOs: 521-526, SEQ ID NOs: 531-536, SEQ ID NOs: 541-546, SEQ ID NOs: 551-556, SEQ ID NOs: 561-566, SEQ ID NOs: 571-576, SEQ ID NOs: 581-586, SEQ ID NOs: 591-596, SEQ ID NOs: 601-606, SEQ ID NOs: 611-616, SEQ ID NOs: 621-626, SEQ ID NOs: 631-636, SEQ ID NOs: 641-646, SEQ ID NOs: 651-656, SEQ ID NOs: 661-666, SEQ ID NOs: 671-676, SEQ ID NOs: 681-686, SEQ ID NOs: 691-696, SEQ ID NOs: 701-706, SEQ ID NOs: 711-716, SEQ ID NOs: 721-726, SEQ ID NOs: 731-736, SEQ ID NOs: 741-746, SEQ ID NOs: 751-756, SEQ ID NOs: 761-766, SEQ ID NOs: 771-776, SEQ ID NOs: 781-786, SEQ ID NOs: 791-796, SEQ ID NOs: 801-806, SEQ ID NOs: 811-816, SEQ ID NOs: 821-826, SEQ ID NOs: 831-836, SEQ ID NOs: 841-846, SEQ ID NOs: 851-856, SEQ ID NOs: 861-866, SEQ ID NOs: 871-876, SEQ ID NOs: 881-886, SEQ ID NOs: 891-896, SEQ ID NOs: 901-906, SEQ ID NOs: 911-916, SEQ ID NOs: 921-926, SEQ ID NOs: 931-936, SEQ ID NOs: 941-946, SEQ ID NOs: 951-956, SEQ ID NOs: 961-966, SEQ ID NOs: 971-976, SEQ ID NOs: 981-986, particularly SEQ ID Nos: 561-566, SEQ ID Nos: 751-756, SEQ ID NOs: 721-726, and preferably SEQ ID NOs: 721-726.

[0089] Further, the first binding domain of the antibody constructs in combination products, kits, or used in methods according to the present invention which binds to human FLT3 on the surface of a target cell binds to the same epitope of FLT3 as an antibody selected from the group consisting of FL-1 to FL-65 disclosed in WO2017021362, i.e., constructs comprising a VH region comprising CDR-H1, CDR-H2 and CDR-H3 and a VL region comprising CDR-L1, CDR-L2 and CDR-L3 selected from the group comprising: 341-346, SEQ ID NOs: 351-356, SEQ ID NOs: 361-366, SEQ ID NOs: 371-376, SEQ ID NOs: 381-386, SEQ ID NOs: 391-396, SEQ ID NOs: 401-406, SEQ ID NOs: 411-416, SEQ ID NOs: 421-426, SEQ ID NOs: 431-436, SEQ ID NOs: 441-446, SEQ ID NOs: 451-456, SEQ ID NOs: 461-466, SEQ ID NOs: 471-476, SEQ ID NOs: 481-486, SEQ ID NOs: 491-496, SEQ ID NOs: 501-506, SEQ ID NOs: 511-516, SEQ ID NOs: 521-526, SEQ ID NOs: 531-536, SEQ ID NOs: 541-546, SEQ ID NOs: 551-556, SEQ ID NOs: 561-566, SEQ ID NOs: 571-576, SEQ ID NOs: 581-586, SEQ ID NOs: 591-596, SEQ ID NOs: 601-606, SEQ ID NOs: 611-616, SEQ ID NOs: 621-626, SEQ ID NOs: 631-636, SEQ ID NOs: 641-646, SEQ ID NOs: 651-656, SEQ ID NOs: 661-666, SEQ ID NOs: 671-676, SEQ ID NOs: 681-686, SEQ ID NOs: 691-696, SEQ ID NOs: 701-706, SEQ ID NOs: 711-716, SEQ ID NOs: 721-726, SEQ ID NOs: 731-736, SEQ ID NOs: 741-746, SEQ ID NOs: 751-756, SEQ ID NOs: 761-766, SEQ ID NOs: 771-776, SEQ ID NOs: 781-786, SEQ ID NOs: 791-796, SEQ ID NOs: 801-806, SEQ ID NOs: 811-816, SEQ ID NOs: 821-826, SEQ ID NOs: 831-836, SEQ ID NOs: 841-846, SEQ ID NOs: 851-856, SEQ ID NOs: 861-866, SEQ ID NOs: 871-876, SEQ ID NOs: 881-886, SEQ ID NOs: 891-896, SEQ ID NOs: 901-906, SEQ ID NOs: 911-916, SEQ ID NOs: 921-926, SEQ ID NOs: 931-936, SEQ ID NOs: 941-946, SEQ ID NOs: 951-956, SEQ ID NOs: 961-966, SEQ ID NOs: 971-976, SEQ ID NOs: 981-986, particularly SEQ ID Nos: 561-566, SEQ ID Nos: 751-756, SEQ ID NOs: 721-726, and preferably SEQ ID NOs: 721-726.

[0090] It is envisaged for the antibody construct in combination products and in kits of the invention, which may be used in methods or is generally used in accordance with the present invention binds to FLT3, and/or binds to the same epitope and/or competes with and antibody construct that comprises a VL region comprising CDR-L1, CDR-L2 and CDR-L3 selected from those depicted in: SEQ ID NOs: 344-346, SEQ ID NOs: 354-356, SEQ ID NOs: 364-366, SEQ ID NOs: 374-376, SEQ ID NOs: 384-386, SEQ ID NOs: 394-396, SEQ ID NOs: 404-406, SEQ ID NOs: 414-416, SEQ ID NOs: 424-426, SEQ ID NOs: 434-436, SEQ ID NOs: 444-446, SEQ ID NOs: 454-456, SEQ ID NOs: 464-466, SEQ ID NOs: 474-476, SEQ ID NOs: 484-486, SEQ ID NOs: 494-496, SEQ ID NOs: 504-506, SEQ ID NOs: 514-516, SEQ ID NOs: 524-526, SEQ ID NOs: 534-536, SEQ ID NOs: 544-546, SEQ ID NOs: 554-556, SEQ ID NOs: 564-566, SEQ ID NOs: 574-576, SEQ ID NOs: 584-586, SEQ ID NOs: 594-596, SEQ ID NOs: 604-606, SEQ ID NOs: 614-616, SEQ ID NOs: 624-626, SEQ ID NOs: 634-636, SEQ ID NOs: 644-646, SEQ ID NOs: 654-656, SEQ ID NOs: 664-666, SEQ ID NOs: 674-676, SEQ ID NOs: 684-686, SEQ ID NOs: 694-696, SEQ ID NOs: 704-706, SEQ ID NOs: 714-716, SEQ ID NOs: 724-726, SEQ ID NOs: 734-736, SEQ ID NOs: 744-746, SEQ ID NOs: 754-756, SEQ ID NOs: 764-766, SEQ ID NOs: 774-776, SEQ ID NOs: 784-786, SEQ ID NOs: 794-796, SEQ ID NOs: 804-806, SEQ ID NOs: 814-816, SEQ ID NOs: 824-826, SEQ ID NOs: 834-836, SEQ ID NOs: 844-846, SEQ ID NOs: 854-856, SEQ ID NOs: 864-866, SEQ ID NOs: 874-876, SEQ ID NOs: 884-886, SEQ ID NOs: 894-896, SEQ ID NOs: 904-906, SEQ ID NOs: 914-916, SEQ ID NOs: 924-926, SEQ ID NOs: 934-936, SEQ ID NOs: 944-946, SEQ ID NOs: 954-956, SEQ ID NOs: 964-966, SEQ ID NOs: 974-976, SEQ ID NOs: 984-986, particularly SEQ ID Nos: 564-566, SEQ ID Nos: 754-756, SEQ ID NOs: 724-726, and preferably SEQ ID NOs: 724-726.

[0091] It is further envisaged for the antibody construct which may be used in methods or is generally used in accordance with this aspect of the present invention that it binds to FLT3 and/or binds to an epitope recognized and/or competes with an antibody construct that comprises a VH region comprising CDR-H1, CDR-H2 and CDR-H3 selected from those depicted in SEQ ID NOs: 341-343, as depicted in SEQ ID NOs: 351-353, SEQ ID NOs: 361-363, SEQ ID NOs: 371-373, SEQ ID NOs: 381-383, SEQ ID NOs: 391-393, SEQ ID NOs: 401-403, SEQ ID NOs: 411-413, SEQ ID NOs: 421-423, SEQ ID NOs: 431-433, SEQ ID NOs: 441-443, SEQ ID NOs: 451-453, SEQ ID NOs: 461-463, SEQ ID NOs: 471-473, SEQ ID NOs: 481-483, SEQ ID NOs: 491-493, SEQ ID NOs: 501-503, SEQ ID NOs: 511-513, SEQ ID NOs: 521-523, SEQ ID NOs: 53-533, SEQ ID NOs: 541-543, SEQ ID NOs: 551-553, SEQ ID NOs: 561-563, SEQ ID NOs: 571-573, SEQ ID NOs: 581-583, SEQ ID NOs: 591-593, SEQ ID NOs: 601-603, SEQ ID NOs: 611-613, SEQ ID NOs: 621-623, SEQ ID NOs: 631-633, SEQ ID NOs: 641-643, SEQ ID NOs: 651-653, SEQ ID NOs: 661-663, SEQ ID NOs: 671-673, SEQ ID NOs: 681-683, SEQ ID NOs: 691-693, SEQ ID NOs: 701-703, SEQ ID NOs: 711-713, SEQ ID NOs: 721-723, SEQ ID NOs: 731-733, SEQ ID NOs: 741-743, SEQ ID NOs: 751-753, SEQ ID NOs: 761-763, SEQ ID NOs: 771-773, SEQ ID NOs: 781-783, SEQ ID NOs: 791-793, SEQ ID NOs: 801-803, SEQ ID NOs: 811-813, SEQ ID NOs: 821-823, SEQ ID NOs: 831-833, SEQ ID NOs: 841-843, SEQ ID NOs: 851-853, SEQ ID NOs: 861-863, SEQ ID NOs: 871-873, SEQ ID NOs: 881-883, SEQ ID NOs: 891-896, SEQ ID NOs: 901-903, SEQ ID NOs: 911-913, SEQ ID NOs: 921-923, SEQ ID NOs: 931-933, SEQ ID NOs: 941-943, SEQ ID NOs: 951-953, SEQ ID NOs: 961-963, SEQ ID NOs: 971-973, SEQ ID NOs: 981-983, particularly SEQ ID Nos: 561-563, SEQ ID Nos: 751-753, SEQ ID NOs: 721-723, and preferably SEQ ID NOs: 721-723.

[0092] It is furthermore envisaged for the antibody construct in combination products and in kits according to this sub-aspect of the invention, which binds to FLT3 or binds to and epitope recognized by and/or competes with an antibody construct that comprises a VL region comprising CDR-L1, CDR-L2 and CDR-L3 and a VH region comprising CDR-H1, CDR-H2 and CDR-H3 selected from the sequences in the two preceding paragraphs, particularly from the sequences selected from the group of members comprising the following six CDR sequences: 341-346, SEQ ID NOs: 351-356, SEQ ID NOs: 361-366, SEQ ID NOs: 371-376, SEQ ID NOs: 381-386, SEQ ID NOs: 391-396, SEQ ID NOs: 401-406, SEQ ID NOs: 411-416, SEQ ID NOs: 421-426, SEQ ID NOs: 431-436, SEQ ID NOs: 441-446, SEQ ID NOs: 451-456, SEQ ID NOs: 461-466, SEQ ID NOs: 471-476, SEQ ID NOs: 481-486, SEQ ID NOs: 491-496, SEQ ID NOs: 501-506, SEQ ID NOs: 511-516, SEQ ID NOs: 521-526, SEQ ID NOs: 531-536, SEQ ID NOs: 541-546, SEQ ID NOs: 551-556, SEQ ID NOs: 561-566, SEQ ID NOs: 571-576, SEQ ID NOs: 581-586, SEQ ID NOs: 591-596, SEQ ID NOs: 601-606, SEQ ID NOs: 611-616, SEQ ID NOs: 621-626, SEQ ID NOs: 631-636, SEQ ID NOs: 641-646, SEQ ID NOs: 651-656, SEQ ID NOs: 661-666, SEQ ID NOs: 671-676, SEQ ID NOs: 681-686, SEQ ID NOs: 691-696, SEQ ID NOs: 701-706, SEQ ID NOs: 711-716, SEQ ID NOs: 721-726, SEQ ID NOs: 731-736, SEQ ID NOs: 741-746, SEQ ID NOs: 751-756, SEQ ID NOs: 761-766, SEQ ID NOs: 771-776, SEQ ID NOs: 781-786, SEQ ID NOs: 791-796, SEQ ID NOs: 801-806, SEQ ID NOs: 811-816, SEQ ID NOs: 821-826, SEQ ID NOs: 831-836, SEQ ID NOs: 841-846, SEQ ID NOs: 851-856, SEQ ID NOs: 861-866, SEQ ID NOs: 871-876, SEQ ID NOs: 881-886, SEQ ID NOs: 891-896, SEQ ID NOs: 901-906, SEQ ID NOs: 911-916, SEQ ID NOs: 921-926, SEQ ID NOs: 931-936, SEQ ID NOs: 941-946, SEQ ID NOs: 951-956, SEQ ID NOs: 961-966, SEQ ID NOs: 971-976, SEQ ID NOs: 981-986, particularly SEQ ID Nos: 561-566, SEQ ID Nos: 751-756, SEQ ID NOs: 721-726, and preferably SEQ ID NOs: 721-726.

[0093] It is also envisaged for the antibody construct used in accordance with the present invention that the domain which selectively binds to an epitope of FLT3 that it competes with those explicitly recited herein, i.e. those characterized by specific SEQ ID Nos. Whether or not an antibody construct binds to the same epitope of FLT3 as another given antibody construct can be measured e.g. by epitope mapping with chimeric or truncated target molecules, e.g. as described herein above and in the Examples in WO2017021362. Whether an antibody construct competes for binding with another given antibody construct can be measured in a competition assay such as a competitive ELISA or a cell-based competition assay. Avidin-coupled microparticles (beads) can also be used. Like an avidin-coated ELISA plate, when reacted with a biotinylated protein, each of these beads can be used as a substrate on which an assay can be performed. Antigen is coated onto a bead and then precoated with the first antibody. The second antibody is added, and any additional binding is determined. Possible means for the read-out includes flow cytometry.

[0094] A preferred antibody construct according to the invention can also be defined as a bispecific antibody construct comprising a first binding domain which binds to human FLT3 on the surface of a target cell and a second binding domain which binds to CD3, preferably human CD3, wherein the first binding domain competes for binding with an antibody selected from the group consisting of FL-1 to FL-65 as disclosed in WO2017021362, i.e., an antibody comprising a VH region comprising CDR-H1, CDR-H2 and CDR-H3 and a VL region comprising CDR-L1, CDR-L2 and CDR-L3 selected from the group consisting of those described above.

[0095] Accordingly, the antibody construct in combination products and in kits of the invention, which may be used in accordance with the present invention comprises a domain that binds to FLT3 comprising a VL region selected from the group comprising any one of those depicted in SEQ ID NO: 348, SEQ ID NO: 358, SEQ ID NO: 368, SEQ ID NO: 378, SEQ ID NO: 388, SEQ ID NO: 398, SEQ ID NO: 407+408, SEQ ID NO: 418, SEQ ID NO: 428, SEQ ID NO: 438, SEQ ID NO: 448, SEQ ID NO: 458, SEQ ID NO: 468, SEQ ID NO: 478, SEQ ID NO: 488, SEQ ID NO: 498, SEQ ID NO: 508, SEQ ID NO: 518, SEQ ID NO: 528, SEQ ID NO: 538, SEQ ID NO: 548, SEQ ID NO: 558, SEQ ID NO: 568, SEQ ID NO: 578, SEQ ID NO: 588, SEQ ID NO: 598, SEQ ID NO: 608, SEQ ID NO: 618, SEQ ID NO: 628, SEQ ID NO: 638, SEQ ID NO: 648, SEQ ID NO: 658, SEQ ID NO: 668, SEQ ID NO: 678, SEQ ID NO: 688, SEQ ID NO: 698, SEQ ID NO: 708, SEQ ID NO: 718, SEQ ID NO: 728, SEQ ID NO: 738, SEQ ID NO: 748, SEQ ID NO: 758, SEQ ID NO: 768, SEQ ID NO: 778, SEQ ID NO: 788, SEQ ID NO: 798, SEQ ID NO: 808, SEQ ID NO: 818, SEQ ID NO: 828, SEQ ID NO: 838, SEQ ID NO: 848, SEQ ID NO: 858, SEQ ID NO: 868, SEQ ID NO: 878, SEQ ID NO: 888, SEQ ID NO: 898, SEQ ID NO: 908, SEQ ID NO: 918, SEQ ID NO: 928, SEQ ID NO: 938, SEQ ID NO: 948, SEQ ID NO: 958, SEQ ID NO: 968, SEQ ID NO: 978, particularly SEQ ID Nos: 728, 568, 758, preferably SEQ ID NO: 728.

[0096] Accordingly, the antibody construct in combination products and in kits of the invention, which may be used in in accordance with the present invention comprises a domain that binds to FLT3 comprising a VH region selected from the group of VH regions comprising those depicted in any one of SEQ ID NO: 347, SEQ ID NO: 357, SEQ ID NO: 367, SEQ ID NO: 377, SEQ ID NO: 387, SEQ ID NO: 397, SEQ ID NO: 407, SEQ ID NO: 417, SEQ ID NO: 427, SEQ ID NO: 437, SEQ ID NO: 447, SEQ ID NO: 457, SEQ ID NO: 467, SEQ ID NO: 477, SEQ ID NO: 487, SEQ ID NO: 497, SEQ ID NO: 507, SEQ ID NO: 517, SEQ ID NO: 527, SEQ ID NO: 537, SEQ ID NO: 547, SEQ ID NO: 557, SEQ ID NO: 567, SEQ ID NO: 577, SEQ ID NO: 587, SEQ ID NO: 597, SEQ ID NO: 607, SEQ ID NO: 617, SEQ ID NO: 627, SEQ ID NO: 637, SEQ ID NO: 647, SEQ ID NO: 657, SEQ ID NO: 667, SEQ ID NO: 677, SEQ ID NO: 687, SEQ ID NO: 697, SEQ ID NO: 707, SEQ ID NO: 717, SEQ ID NO: 727, SEQ ID NO: 737, SEQ ID NO: 747, SEQ ID NO: 757, SEQ ID NO: 767, SEQ ID NO: 777, SEQ ID NO: 787, SEQ ID NO: 797, SEQ ID NO: 807, SEQ ID NO: 817, SEQ ID NO: 827, SEQ ID NO: 837, SEQ ID NO: 847, SEQ ID NO: 857, SEQ ID NO: 867, SEQ ID NO: 877, SEQ ID NO: 887, SEQ ID NO: 897, SEQ ID NO: 907, SEQ ID NO: 917, SEQ ID NO: 927, SEQ ID NO: 937, SEQ ID NO: 947, SEQ ID NO: 957, SEQ ID NO: 967, SEQ ID NO: 977, particularly SEQ ID Nos: 727, 767, 757, preferably SEQ ID NO: 727.

[0097] Accordingly, the antibody construct in combination products and in kits of the invention, which may be used in accordance with the present invention comprises a domain that binds to FLT3 and comprises pairs consisting of a VH region and a VL region comprising those depicted in SEQ ID NO: 347+348, SEQ ID NO: 357+358, SEQ ID NO: 367+368, SEQ ID NO: 377+378, SEQ ID NO: 387+388, SEQ ID NO: 397+398, SEQ ID NO: 407+408, SEQ ID NO: 417+418, SEQ ID NO: 427+428, SEQ ID NO: 437+438, SEQ ID NO: 447+448, SEQ ID NO: 457+458, SEQ ID NO: 467+468, SEQ ID NO: 477+478, SEQ ID NO: 487+488, SEQ ID NO: 497+498, SEQ ID NO: 507+508, SEQ ID NO: 517+518, SEQ ID NO: 527+528, SEQ ID NO: 537+538, SEQ ID NO: 547+548, SEQ ID NO: 557+558, SEQ ID NO: 567+568, SEQ ID NO: 577+578, SEQ ID NO: 587+588, SEQ ID NO: 597+598, SEQ ID NO: 607+608, SEQ ID NO: 617+618, SEQ ID NO: 627+628, SEQ ID NO: 637+638, SEQ ID NO: 647+648, SEQ ID NO: 657+658, SEQ ID NO: 667+668, SEQ ID NO: 677+678, SEQ ID NO: 687+688, SEQ ID NO: 697+698, SEQ ID NO: 707+708, SEQ ID NO: 717+718, SEQ ID NO: 727+728, SEQ ID NO: 737+738, SEQ ID NO: 747+748, SEQ ID NO: 757+758, SEQ ID NO: 767+768, SEQ ID NO: 777+778, SEQ ID NO: 787+788, SEQ ID NO: 797+798, SEQ ID NO: 807+808, SEQ ID NO: 817+818, SEQ ID NO: 827+828, SEQ ID NO: 837+838, SEQ ID NO: 847+848, SEQ ID NO: 857+858, SEQ ID NO: 867+868, SEQ ID NO: 877+878, SEQ ID NO: 887+888, SEQ ID NO: 897+898, SEQ ID NO: 907+908, SEQ ID NO: 917+918, SEQ ID NO: 927+928, SEQ ID NO: 937+938, SEQ ID NO: 947+948, SEQ ID NO: 957+958, SEQ ID NO: 967+968, SEQ ID NO: 977+978, and SEQ ID NO: 987+988, particularly SEQ ID Nos: 727+728, 767+568, 757+758, preferably SEQ ID NO: 727+728.

[0098] Accordingly, the antibody construct in combination products and in kits of the invention, which may be used in accordance with the present invention comprises a domain binding to FLT3 comprising a polypeptide selected from the group consisting of those depicted in SEQ ID NO: 349, SEQ ID NO: 359, SEQ ID NO: 369, SEQ ID NO: 379, SEQ ID NO: 389, SEQ ID NO: 399, SEQ ID NO: 409, SEQ ID NO: 419, SEQ ID NO: 429, SEQ ID NO: 439, SEQ ID NO: 449, SEQ ID NO: 459, SEQ ID NO: 469, SEQ ID NO: 479, SEQ ID NO: 489, SEQ ID NO: 499, SEQ ID NO: 509, SEQ ID NO: 519, SEQ ID NO: 529, SEQ ID NO: 539, SEQ ID NO: 549, SEQ ID NO: 559, SEQ ID NO: 569, SEQ ID NO: 579, SEQ ID NO: 589, SEQ ID NO: 599, SEQ ID NO: 609, SEQ ID NO: 619, SEQ ID NO: 629, SEQ ID NO: 639, SEQ ID NO: 649, SEQ ID NO: 659, SEQ ID NO: 669, SEQ ID NO: 679, SEQ ID NO: 689, SEQ ID NO: 699, SEQ ID NO: 709, SEQ ID NO: 719, SEQ ID NO: 729, SEQ ID NO: 739, SEQ ID NO: 749, SEQ ID NO: 759, SEQ ID NO: 769, SEQ ID NO: 779, SEQ ID NO: 789, SEQ ID NO: 799, SEQ ID NO: 809, SEQ ID NO: 819, SEQ ID NO: 829, SEQ ID NO: 839, SEQ ID NO: 849, SEQ ID NO: 859, SEQ ID NO: 869, SEQ ID NO: 879, SEQ ID NO: 889, SEQ ID NO: 899, SEQ ID NO: 909, SEQ ID NO: 919, SEQ ID NO: 929, SEQ ID NO: 939, SEQ ID NO: 949, SEQ ID NO: 959, SEQ ID NO: 969, SEQ ID NO: 979, and SEQ ID NO: 989, particularly SEQ ID NOS: 729, 759, 569, particularly SEQ ID NOS: 729, 759, 569, preferably SEQ ID NO: 729.

[0099] Accordingly, the antibody construct in combination products and in kits of the invention, which may be used in accordance with the present invention which binds to CD3 and FLT3 may be selected, for example, from the group comprising SEQ ID Nos: 350, 360, 370, 380, 390, 400, 410, 420, 430, 440, 450, 460, 470, 480, 490, 500, 510, 520, 530, 540, 550, 560, 570, 580, 590, 600, 610, 620, 630, 640, 650, 660, 670, 680, 690, 700, 710, 720, 730, 740, 750, 760, 770, 780, 790, 800, 810, 820, 830, 840, 850, 860, 870, 880, 890, 900, 910, 920, 930, 940, 950, 960, 970, 980, and 990, particularly SEQ ID Nos: 570, 760, and 730, preferably SEQ ID NO: 730.

[0100] The above binding domains (which are specified by their CDRs, VH region and VL region and combinations thereof) are binding domains which bind to an epitope of FLT3 which is comprised within the region as depicted in SEQ ID NO: 991 such as disclosed in WO2017021362.

[0101] The antibody constructs binding to FLT3 as disclosed above are intended for the treatment and optionally also for use in the prevention, prophylaxis, treatment or amelioration of a hematological cancer disease or a metastatic cancer disease, particularly of AML or a metastatic cancer disease derived from AML, and are part of combination products, kits, etc., and/or may be used in or administered in steps of methods according to the present invention, i.e. together with an inhibitor/antagonist of TNF/TNFR that reduces TNF/TNFR signaling, wherein said inhibitor/antagonist of TNF/TNFR that reduces TNF/TNFR signaling (b) is administered to a patient in need thereof prior to and optionally also following administration of said antibody construct (a), wherein the patient is preferably a human being or a non-human primate, and wherein said inhibitor/antagonist is administered to prevent, reduce or ameliorate cytokine release syndrome (CRS) or other adverse effects that may associated with administration of CD3-binding construct sas disclosed throughout the present specification and as set out below:

(i) The combination product for the treatment of and optionally also for the prevention, prophylaxis, or reduction of adverse events associated with immunotherapy, particularly cancer immunotherapy, more particularly of AML, with an antibody construct comprising at least one domain (also referred to as “first domain”) which binds to a target antigen on the surface of a target cell, and at least one other domain (also referred to as “second domain”) which binds to CD3, preferably human CD3, on the surface of a T cell according to any one of embodiments (i) to (xiv) of general Aspect A), comprising
[0102] (a) at least one antibody construct referred to in the preamble, and
[0103] (b) an inhibitor/antagonist of TNF/TNFR that reduces TNF/TNFR signaling,
   wherein said inhibitor/antagonist of TNF/TNFR that reduces TNF/TNFR signaling referred to in (b) is for administration to a patient prior to and optionally also following administration of said antibody construct referred to in (a), wherein the first domain binds selectively to human FLT3 (SEQ ID NO: 989).
   (ii) The combination product for the treatment of and optionally also for the prevention, prophylaxis, or reduction of adverse events associated with immunotherapy, particularly cancer immunotherapy, more particularly of AML, with an antibody construct comprising at least one domain which binds selectively to FLT3 on the surface of a target cell, and at least one other domain which binds to CD3, preferably human CD3, on the surface of a T cell according to embodiment (i) of Sub-Aspect A-3, comprising
[0104] (a) at least one antibody construct referred to in the preamble, and
[0105] (b) an inhibitor/antagonist of TNF/TNFR that reduces TNF/TNFR signaling,
   wherein said inhibitor/antagonist of TNF/TNFR that reduces TNF/TNFR signaling referred to in (b) is for administration to a patient prior to and optionally also following administration of said antibody construct referred to in (a), wherein said antibody construct binds to an epitope that is selectively bound by an antibody/antibody construct that comprises the following CDRs of the VH chain and/or VL chain respectively, wherein the CDRs are selected from the group comprising the VH-CDR1, VH-CDR2, VH-CDR3, VL-CDR1, VL-CDR2, and VL-CDR3 regions depicted in SEQ ID Nos: SEQ ID NOs: 341-346, SEQ ID NOs: 351-356, SEQ ID NOs: 361-366, SEQ ID NOs: 371-376, SEQ ID NOs: 381-386, SEQ ID NOs: 391-396, SEQ ID NOs: 401-406, SEQ ID NOs: 411-416, SEQ ID NOs: 421-426, SEQ ID NOs: 431-436, SEQ ID NOs: 441-446, SEQ ID NOs: 451-456, SEQ ID NOs: 461-466, SEQ ID NOs: 471-476, SEQ ID NOs: 481-486, SEQ ID NOs: 491-496, SEQ ID NOs: 501-506, SEQ ID NOs: 511-516, SEQ ID NOs: 521-526, SEQ ID NOs: 531-536, SEQ ID NOs: 541-546, SEQ ID NOs: 551-556, SEQ ID NOs: 561-566, SEQ ID NOs: 571-576, SEQ ID NOs: 581-586, SEQ ID NOs: 591-596, SEQ ID NOs: 601-606, SEQ ID NOs: 611-616, SEQ ID NOs: 621-626, SEQ ID NOs: 631-636, SEQ ID NOs: 641-646, SEQ ID NOs: 651-656, SEQ ID NOs: 661-666, SEQ ID NOs: 671-676, SEQ ID NOs: 681-686, SEQ ID NOs: 691-696, SEQ ID NOs: 701-706, SEQ ID NOs: 711-716, SEQ ID NOs: 721-726, SEQ ID NOs: 731-736, SEQ ID NOs: 741-746, SEQ ID NOs: 751-756, SEQ ID NOs: 761-766, SEQ ID NOs: 771-776, SEQ ID NOs: 781-786, SEQ ID NOs: 791-796, SEQ ID NOs: 801-806, SEQ ID NOs: 811-816, SEQ ID NOs: 821-826, SEQ ID NOs: 831-836, SEQ ID NOs: 841-846, SEQ ID NOs: 851-856, SEQ ID NOs: 861-866, SEQ ID NOs: 871-876, SEQ ID NOs: 881-886, SEQ ID NOs: 891-896, SEQ ID NOs: 901-906, SEQ ID NOs: 911-916, SEQ ID NOs: 921-926, SEQ ID NOs: 931-936, SEQ ID NOs: 941-946, SEQ ID NOs: 951-956, SEQ ID NOs: 961-966, SEQ ID NOs: 971-976, SEQ ID NOs: 981-986, particularly SEQ ID Nos: 561-566, SEQ ID Nos: 751-756, SEQ ID NOs: 721-726, and preferably SEQ ID NOs: 721-726.
   (iii) The combination product for the treatment of and optionally also for the prevention, prophylaxis, or reduction of adverse events associated with immunotherapy, particularly cancer immunotherapy, more particularly of AML, with an antibody construct comprising at least one domain which binds selectively to FLT3 on the surface of a target cell, and at least one other domain which binds to CD3, preferably human CD3, on the surface of a T cell according to embodiments (i) and (ii) of Sub-Aspect A-3, comprising
[0106] (a) at least one antibody construct referred to in the preamble, and
[0107] (b) an inhibitor/antagonist of TNF/TNFR that reduces TNF/TNFR signaling,
   wherein said inhibitor/antagonist of TNF/TNFR that reduces TNF/TNFR signaling referred to in (b) is for administration to a patient prior to and optionally also following administration of said antibody construct referred to in (a), wherein said antibody construct comprises the following CDRs of the VH chain and/or VL chain respectively, wherein the CDRs are selected from the group comprising the VH-CDR1, VH-CDR2, VH-CDR3, VL-CDR1, VL-CDR2, and VL-CDR3 regions depicted in SEQ ID Nos: SEQ ID NOs: 341-346, SEQ ID NOs: 351-356, SEQ ID NOs: 361-366, SEQ ID NOs: 371-376, SEQ ID NOs: 381-386, SEQ ID NOs: 391-396, SEQ ID NOs: 401-406, SEQ ID NOs: 411-416, SEQ ID NOs: 421-426, SEQ ID NOs: 431-436, SEQ ID NOs: 441-446, SEQ ID NOs: 451-456, SEQ ID NOs: 461-466, SEQ ID NOs: 471-476, SEQ ID NOs: 481-486, SEQ ID NOs: 491-496, SEQ ID NOs: 501-506, SEQ ID NOs: 511-516, SEQ ID NOs: 521-526, SEQ ID NOs: 531-536, SEQ ID NOs: 541-546, SEQ ID NOs: 551-556, SEQ ID NOs: 561-566, SEQ ID NOs: 571-576, SEQ ID NOs: 581-586, SEQ ID NOs: 591-596, SEQ ID NOs: 601-606, SEQ ID NOs: 611-616, SEQ ID NOs: 621-626, SEQ ID NOs: 631-636, SEQ ID NOs: 641-646, SEQ ID NOs: 651-656, SEQ ID NOs: 661-666, SEQ ID NOs: 671-676, SEQ ID NOs: 681-686, SEQ ID NOs: 691-696, SEQ ID NOs: 701-706, SEQ ID NOs: 711-716, SEQ ID NOs: 721-726, SEQ ID NOs: 731-736, SEQ ID NOs: 741-746, SEQ ID NOs: 751-756, SEQ ID NOs: 761-766, SEQ ID NOs: 771-776, SEQ ID NOs: 781-786, SEQ ID NOs: 791-796, SEQ ID NOs: 801-806, SEQ ID NOs: 811-816, SEQ ID NOs: 821-826, SEQ ID NOs: 831-836, SEQ ID NOs: 841-846, SEQ ID NOs: 851-856, SEQ ID NOs: 861-866, SEQ ID NOs: 871-876, SEQ ID NOs: 881-886, SEQ ID NOs: 891-896, SEQ ID NOs: 901-906, SEQ ID NOs: 911-916, SEQ ID NOs: 921-926, SEQ ID NOs: 931-936, SEQ ID NOs: 941-946, SEQ ID NOs: 951-956, SEQ ID NOs: 961-966, SEQ ID NOs: 971-976, SEQ ID NOs: 981-986, particularly SEQ ID Nos: 561-566, SEQ ID Nos: 751-756, SEQ ID NOs: 721-726, and preferably SEQ ID NOs: 721-726.
   (iv) The combination product for the treatment of and optionally also for the prevention, prophylaxis, or reduction of adverse events associated with immunotherapy, particularly cancer immunotherapy, more particularly of AML, with an antibody construct comprising at least one domain which binds selectively to FLT3 on the surface of a target cell, and at least one other domain which binds to CD3, preferably human CD3, on the surface of a T cell according to embodiment (i) to (iv) of Sub-Aspect A-3, comprising
[0108] (a) at least one antibody construct referred to in the preamble, and
[0109] (b) an inhibitor/antagonist of TNF/TNFR that reduces TNF/TNFR signaling,
   wherein said inhibitor/antagonist of TNF/TNFR that reduces TNF/TNFR signaling referred to in (b) is for administration to a patient prior to and optionally also following administration of said antibody construct referred to in (a), wherein said antibody construct binds to an epitope that is selectively bound by an antibody/antibody construct that comprises the following CDRs of the VH chain and/or VL chain respectively, wherein the CDRs are selected from the group comprising the VH-CDR1, VH-CDR2, VH-CDR3, VL-CDR1, VL-CDR2, and VL-CDR3 regions depicted in SEQ ID Nos: SEQ ID NOs: 341-346, SEQ ID NOs: 351-356, SEQ ID NOs: 361-366, SEQ ID NOs: 371-376, SEQ ID NOs: 381-386, SEQ ID NOs: 391-396, SEQ ID NOs: 401-406, SEQ ID NOs: 411-416, SEQ ID NOs: 421-426, SEQ ID NOs: 431-436, SEQ ID NOs: 441-446, SEQ ID NOs: 451-456, SEQ ID NOs: 461-466, SEQ ID NOs: 471-476, SEQ ID NOs: 481-486, SEQ ID NOs: 491-496, SEQ ID NOs: 501-506, SEQ ID NOs: 511-516, SEQ ID NOs: 521-526, SEQ ID NOs: 531-536, SEQ ID NOs: 541-546, SEQ ID NOs: 551-556, SEQ ID NOs: 561-566, SEQ ID NOs: 571-576, SEQ ID NOs: 581-586, SEQ ID NOs: 591-596, SEQ ID NOs: 601-606, SEQ ID NOs: 611-616, SEQ ID NOs: 621-626, SEQ ID NOs: 631-636, SEQ ID NOs: 641-646, SEQ ID NOs: 651-656, SEQ ID NOs: 661-666, SEQ ID NOs: 671-676, SEQ ID NOs: 681-686, SEQ ID NOs: 691-696, SEQ ID NOs: 701-706, SEQ ID NOs: 711-716, SEQ ID NOs: 721-726, SEQ ID NOs: 731-736, SEQ ID NOs: 741-746, SEQ ID NOs: 751-756, SEQ ID NOs: 761-766, SEQ ID NOs: 771-776, SEQ ID NOs: 781-786, SEQ ID NOs: 791-796, SEQ ID NOs: 801-806, SEQ ID NOs: 811-816, SEQ ID NOs: 821-826, SEQ ID NOs: 831-836, SEQ ID NOs: 841-846, SEQ ID NOs: 851-856, SEQ ID NOs: 861-866, SEQ ID NOs: 871-876, SEQ ID NOs: 881-886, SEQ ID NOs: 891-896, SEQ ID NOs: 901-906, SEQ ID NOs: 911-916, SEQ ID NOs: 921-926, SEQ ID NOs: 931-936, SEQ ID NOs: 941-946, SEQ ID NOs: 951-956, SEQ ID NOs: 961-966, SEQ ID NOs: 971-976, SEQ ID NOs: 981-986, particularly SEQ ID Nos: 561-566, SEQ ID Nos: 751-756, SEQ ID NOs: 721-726, and preferably SEQ ID NOs: 721-726.
   (v) The combination product for the treatment of and optionally also for the prevention, prophylaxis, or reduction of adverse events associated with immunotherapy, particularly cancer immunotherapy, more particularly of AML, with an antibody construct comprising at least one domain which binds selectively to FLT3 on the surface of a target cell, and at least one other domain which binds to CD3, preferably human CD3, on the surface of a T cell according to embodiments (i) to (iv) of Sub-Aspect A-3, comprising
[0110] (a) at least one antibody construct referred to in the preamble, and
[0111] (b) an inhibitor/antagonist of TNF/TNFR that reduces TNF/TNFR signaling,
   wherein said inhibitor/antagonist of TNF/TNFR that reduces TNF/TNFR signaling referred to in (b) is for administration to a patient prior to and optionally also following administration of said antibody construct referred to in (a), wherein said antibody construct comprises the following CDRs of the VH chain and/or VL chain respectively, wherein the CDRs are selected from the group comprising the VH-CDR1, VH-CDR2, VH-CDR3, VL-CDR1, VL-CDR2, and VL-CDR3 regions depicted in SEQ ID Nos: SEQ ID NOs: 341-346, SEQ ID NOs: 351-356, SEQ ID NOs: 361-366, SEQ ID NOs: 371-376, SEQ ID NOs: 381-386, SEQ ID NOs: 391-396, SEQ ID NOs: 401-406, SEQ ID NOs: 411-416, SEQ ID NOs: 421-426, SEQ ID NOs: 431-436, SEQ ID NOs: 441-446, SEQ ID NOs: 451-456, SEQ ID NOs: 461-466, SEQ ID NOs: 471-476, SEQ ID NOs: 481-486, SEQ ID NOs: 491-496, SEQ ID NOs: 501-506, SEQ ID NOs: 511-516, SEQ ID NOs: 521-526, SEQ ID NOs: 531-536, SEQ ID NOs: 541-546, SEQ ID NOs: 551-556, SEQ ID NOs: 561-566, SEQ ID NOs: 571-576, SEQ ID NOs: 581-586, SEQ ID NOs: 591-596, SEQ ID NOs: 601-606, SEQ ID NOs: 611-616, SEQ ID NOs: 621-626, SEQ ID NOs: 631-636, SEQ ID NOs: 641-646, SEQ ID NOs: 651-656, SEQ ID NOs: 661-666, SEQ ID NOs: 671-676, SEQ ID NOs: 681-686, SEQ ID NOs: 691-696, SEQ ID NOs: 701-706, SEQ ID NOs: 711-716, SEQ ID NOs: 721-726, SEQ ID NOs: 731-736, SEQ ID NOs: 741-746, SEQ ID NOs: 751-756, SEQ ID NOs: 761-766, SEQ ID NOs: 771-776, SEQ ID NOs: 781-786, SEQ ID NOs: 791-796, SEQ ID NOs: 801-806, SEQ ID NOs: 811-816, SEQ ID NOs: 821-826, SEQ ID NOs: 831-836, SEQ ID NOs: 841-846, SEQ ID NOs: 851-856, SEQ ID NOs: 861-866, SEQ ID NOs: 871-876, SEQ ID NOs: 881-886, SEQ ID NOs: 891-896, SEQ ID NOs: 901-906, SEQ ID NOs: 911-916, SEQ ID NOs: 921-926, SEQ ID NOs: 931-936, SEQ ID NOs: 941-946, SEQ ID NOs: 951-956, SEQ ID NOs: 961-966, SEQ ID NOs: 971-976, SEQ ID NOs: 981-986, particularly SEQ ID Nos: 561-566, SEQ ID Nos: 751-756, SEQ ID NOs: 721-726, and preferably SEQ ID NOs: 721-726.
   (vi) The combination product for the treatment of and optionally also for the prevention, prophylaxis, or reduction of adverse events associated with immunotherapy, particularly cancer immunotherapy, more particularly of AML, with an antibody construct comprising at least one domain which binds selectively to FLT3 on the surface of a target cell, and at least one other domain which binds to CD3, preferably human CD3, on the surface of a T cell according to embodiments (i) to (v) of Sub-Aspect A-3, comprising
[0112] (a) at least one antibody construct referred to in the preamble, and
[0113] (b) an inhibitor/antagonist of TNF/TNFR that reduces TNF/TNFR signaling,
   wherein said inhibitor/antagonist of TNF/TNFR that reduces TNF/TNFR signaling referred to in (b) is for administration to a patient prior to and optionally also following administration of said antibody construct referred to in (a), wherein the domain which binds to FLT3 comprises a VL region comprising CDR-L1, CDR-L2 and CDR-L3 selected from those as depicted in SEQ ID NOs: 344-346, SEQ ID NOs: 354-356, SEQ ID NOs: 364-366, SEQ ID NOs: 374-376, SEQ ID NOs: 384-386, SEQ ID NOs: 394-396, SEQ ID NOs: 404-406, SEQ ID NOs: 414-416, SEQ ID NOs: 424-426, SEQ ID NOs: 434-436, SEQ ID NOs: 444-446, SEQ ID NOs: 454-456, SEQ ID NOs: 464-466, SEQ ID NOs: 474-476, SEQ ID NOs: 484-486, SEQ ID NOs: 494-496, SEQ ID NOs: 504-506, SEQ ID NOs: 514-516, SEQ ID NOs: 524-526, SEQ ID NOs: 534-536, SEQ ID NOs: 544-546, SEQ ID NOs: 554-556, SEQ ID NOs: 564-566, SEQ ID NOs: 574-576, SEQ ID NOs: 584-586, SEQ ID NOs: 594-596, SEQ ID NOs: 604-606, SEQ ID NOs: 614-616, SEQ ID NOs: 624-626, SEQ ID NOs: 634-636, SEQ ID NOs: 644-646, SEQ ID NOs: 654-656, SEQ ID NOs: 664-666, SEQ ID NOs: 674-676, SEQ ID NOs: 684-686, SEQ ID NOs: 694-696, SEQ ID NOs: 704-706, SEQ ID NOs: 714-716, SEQ ID NOs: 724-726, SEQ ID NOs: 734-736, SEQ ID NOs: 744-746, SEQ ID NOs: 754-756, SEQ ID NOs: 764-766, SEQ ID NOs: 774-776, SEQ ID NOs: 784-786, SEQ ID NOs: 794-796, SEQ ID NOs: 804-806, SEQ ID NOs: 814-816, SEQ ID NOs: 824-826, SEQ ID NOs: 834-836, SEQ ID NOs: 844-846, SEQ ID NOs: 854-856, SEQ ID NOs: 864-866, SEQ ID NOs: 874-876, SEQ ID NOs: 884-886, SEQ ID NOs: 894-896, SEQ ID NOs: 904-906, SEQ ID NOs: 914-916, SEQ ID NOs: 924-926, SEQ ID NOs: 934-936, SEQ ID NOs: 944-946, SEQ ID NOs: 954-956, SEQ ID NOs: 964-966, SEQ ID NOs: 974-976, SEQ ID NOs: 984-986, preferably SEQ ID NOs: 724-726, particularly SEQ ID Nos: 564-566, SEQ ID Nos: 754-756, SEQ ID NOs: 724-726, and preferably SEQ ID NOs: 724-726.
   (vii) The combination product for the treatment of and optionally also for the prevention, prophylaxis, or reduction of adverse events associated with immunotherapy, particularly cancer immunotherapy, more particularly of AML, with an antibody construct comprising at least one domain which binds selectively to FLT3 on the surface of a target cell, and at least one other domain which binds to CD3, preferably human CD3, on the surface of a T cell according to embodiments (i) to (vi) of Sub-Aspect A-3, comprising
[0114] (a) at least one antibody construct referred to in the preamble, and
[0115] (b) an inhibitor/antagonist of TNF/TNFR that reduces TNF/TNFR signaling,
   wherein said inhibitor/antagonist of TNF/TNFR that reduces TNF/TNFR signaling referred to in (b) is for administration to a patient prior to and optionally also following administration of said antibody construct referred to in (a), wherein the domain which binds to FLT3 comprises a VH region comprising CDR-H1, CDR-H2 and CDR-H3 selected from those depicted in SEQ ID NOs: 341-343; SEQ ID NOs: 351-353, SEQ ID NOs: 361-363, SEQ ID NOs: 371-373, SEQ ID NOs: 381-383, SEQ ID NOs: 391-393, SEQ ID NOs: 401-403, SEQ ID NOs: 411-413, SEQ ID NOs: 421-423, SEQ ID NOs: 431-433, SEQ ID NOs: 441-443, SEQ ID NOs: 451-453, SEQ ID NOs: 461-463, SEQ ID NOs: 471-473, SEQ ID NOs: 481-483, SEQ ID NOs: 491-493, SEQ ID NOs: 501-503, SEQ ID NOs: 511-513, SEQ ID NOs: 521-523, SEQ ID NOs: 531-533, SEQ ID NOs: 541-543, SEQ ID NOs: 551-553, SEQ ID NOs: 561-563, SEQ ID NOs: 571-573, SEQ ID NOs: 581-583, SEQ ID NOs: 591-593, SEQ ID NOs: 601-603, SEQ ID NOs: 611-613, SEQ ID NOs: 621-623, SEQ ID NOs: 631-633, SEQ ID NOs: 641-643, SEQ ID NOs: 651-653, SEQ ID NOs: 661-663, SEQ ID NOs: 671-673, SEQ ID NOs: 681-683, SEQ ID NOs: 691-693, SEQ ID NOs: 701-703, SEQ ID NOs: 711-713, SEQ ID NOs: 721-723, SEQ ID NOs: 731-733, SEQ ID NOs: 741-743, SEQ ID NOs: 751-753, SEQ ID NOs: 761-763, SEQ ID NOs: 771-773, SEQ ID NOs: 781-783, SEQ ID NOs: 791-793, SEQ ID NOs: 801-803, SEQ ID NOs: 811-813, SEQ ID NOs: 821-823, SEQ ID NOs: 831-833, SEQ ID NOs: 841-843, SEQ ID NOs: 851-853, SEQ ID NOs: 861-863, SEQ ID NOs: 871-873, SEQ ID NOs: 881-883, SEQ ID NOs: 891-896, SEQ ID NOs: 901-903, SEQ ID NOs: 911-913, SEQ ID NOs: 921-923, SEQ ID NOs: 931-933, SEQ ID NOs: 941-943, SEQ ID NOs: 951-953, SEQ ID NOs: 961-963, SEQ ID NOs: 971-973, SEQ ID NOs: 981-983, particularly SEQ ID Nos: 561-563, SEQ ID Nos: 751-753, SEQ ID NOs: 721-723, and preferably SEQ ID NOs: 721-723.
   (viii) The combination product for the treatment of and optionally also for the prevention, prophylaxis, or reduction of adverse events associated with immunotherapy, particularly cancer immunotherapy, more particularly of AML, with an antibody construct comprising at least one domain which binds selectively to FLT3 on the surface of a target cell, and at least one other domain which binds to CD3, preferably human CD3, on the surface of a T cell according to embodiments (i) to (vii) of Sub-Aspect A-3, comprising
[0116] (a) at least one antibody construct referred to in the preamble, and
[0117] (b) an inhibitor/antagonist of TNF/TNFR that reduces TNF/TNFR signaling,
   wherein said inhibitor/antagonist of TNF/TNFR that reduces TNF/TNFR signaling referred to in (b) is for administration to a patient prior to and optionally also following administration of said antibody construct referred to in (a), wherein the domain which binds to FLT3 comprises a VL region selected from the group of VL regions as depicted in any one of SEQ ID NO: 348, SEQ ID NO: 358, SEQ ID NO: 368, SEQ ID NO: 378, SEQ ID NO: 388, SEQ ID NO: 398, SEQ ID NO: 407+408, SEQ ID NO: 418, SEQ ID NO: 428, SEQ ID NO: 438, SEQ ID NO: 448, SEQ ID NO: 458, SEQ ID NO: 468, SEQ ID NO: 478, SEQ ID NO: 488, SEQ ID NO: 498, SEQ ID NO: 508, SEQ ID NO: 518, SEQ ID NO: 528, SEQ ID NO: 538, SEQ ID NO: 548, SEQ ID NO: 558, SEQ ID NO: 568, SEQ ID NO: 578, SEQ ID NO: 588, SEQ ID NO: 598, SEQ ID NO: 608, SEQ ID NO: 618, SEQ ID NO: 628, SEQ ID NO: 638, SEQ ID NO: 648, SEQ ID NO: 658, SEQ ID NO: 668, SEQ ID NO: 678, SEQ ID NO: 688, SEQ ID NO: 698, SEQ ID NO: 708, SEQ ID NO: 718, SEQ ID NO: 728, SEQ ID NO: 738, SEQ ID NO: 748, SEQ ID NO: 758, SEQ ID NO: 768, SEQ ID NO: 778, SEQ ID NO: 788, SEQ ID NO: 798, SEQ ID NO: 808, SEQ ID NO: 818, SEQ ID NO: 828, SEQ ID NO: 838, SEQ ID NO: 848, SEQ ID NO: 858, SEQ ID NO: 868, SEQ ID NO: 878, SEQ ID NO: 888, SEQ ID NO: 898, SEQ ID NO: 908, SEQ ID NO: 918, SEQ ID NO: 928, SEQ ID NO: 938, SEQ ID NO: 948, SEQ ID NO: 958, SEQ ID NO: 968, SEQ ID NO: 978, preferably SEQ ID NO: 728, particularly SEQ ID Nos: 728, 568, 758, preferably SEQ ID NO: 728.
   (ix) The combination product for the treatment of and optionally also for the prevention, prophylaxis, or reduction of adverse events associated with immunotherapy, particularly cancer immunotherapy, more particularly of AML, with an antibody construct comprising at least one domain which binds selectively to FLT3 on the surface of a target cell, and at least one other domain which binds to CD3, preferably human CD3, on the surface of a T cell according to embodiments (i) to (viii) of Sub-Aspect A-3, comprising
[0118] (a) at least one antibody construct referred to in the preamble, and
[0119] (b) an inhibitor/antagonist of TNF/TNFR that reduces TNF/TNFR signaling,
   wherein said inhibitor/antagonist of TNF/TNFR that reduces TNF/TNFR signaling referred to in (b) is for administration to a patient prior to and optionally also following administration of said antibody construct referred to in (a), wherein the domain which binds to FLT3 comprises a VH region selected from the group consisting of a VH region as depicted in any one of SEQ ID NO: 347, SEQ ID NO: 357, SEQ ID NO: 367, SEQ ID NO: 377, SEQ ID NO: 387, SEQ ID NO: 397, SEQ ID NO: 407, SEQ ID NO: 417, SEQ ID NO: 427, SEQ ID NO: 437, SEQ ID NO: 447, SEQ ID NO: 457, SEQ ID NO: 467, SEQ ID NO: 477, SEQ ID NO: 487, SEQ ID NO: 497, SEQ ID NO: 507, SEQ ID NO: 517, SEQ ID NO: 527, SEQ ID NO: 537, SEQ ID NO: 547, SEQ ID NO: 557, SEQ ID NO: 567, SEQ ID NO: 577, SEQ ID NO: 587, SEQ ID NO: 597, SEQ ID NO: 607, SEQ ID NO: 617, SEQ ID NO: 627, SEQ ID NO: 637, SEQ ID NO: 647, SEQ ID NO: 657, SEQ ID NO: 667, SEQ ID NO: 677, SEQ ID NO: 687, SEQ ID NO: 697, SEQ ID NO: 707, SEQ ID NO: 717, SEQ ID NO: 727, SEQ ID NO: 737, SEQ ID NO: 747, SEQ ID NO: 757, SEQ ID NO: 767, SEQ ID NO: 777, SEQ ID NO: 787, SEQ ID NO: 797, SEQ ID NO: 807, SEQ ID NO: 817, SEQ ID NO: 827, SEQ ID NO: 837, SEQ ID NO: 847, SEQ ID NO: 857, SEQ ID NO: 867, SEQ ID NO: 877, SEQ ID NO: 887, SEQ ID NO: 897, SEQ ID NO: 907, SEQ ID NO: 917, SEQ ID NO: 927, SEQ ID NO: 937, SEQ ID NO: 947, SEQ ID NO: 957, SEQ ID NO: 967, SEQ ID NO: 977, particularly SEQ ID NO: 567, 757, and 727, preferably SEQ ID NO: 727.
   (x) The combination product for the treatment of and optionally also for the prevention, prophylaxis, or reduction of adverse events associated with immunotherapy, particularly cancer immunotherapy, more particularly of AML, with an antibody construct comprising at least one domain which binds selectively to FLT3 on the surface of a target cell, and at least one other domain which binds to CD3, preferably human CD3, on the surface of a T cell according to embodiments (i) to (ix) of Sub-Aspect A-3, comprising
[0120] (a) at least one antibody construct referred to in the preamble, and
[0121] (b) an inhibitor/antagonist of TNF/TNFR that reduces TNF/TNFR signaling,
   wherein said inhibitor/antagonist of TNF/TNFR that reduces TNF/TNFR signaling referred to in (b) is for administration to a patient prior to and optionally also following administration of said antibody construct referred to in (a), wherein the domain which binds to FLT3 comprises pairs of a VH region and a VL region as depicted in SEQ ID NO: 347+348, SEQ ID NO: 357+358, SEQ ID NO: 367+368, SEQ ID NO: 377+378, SEQ ID NO: 387+388, SEQ ID NO: 397+398, SEQ ID NO: 407+408, SEQ ID NO: 417+418, SEQ ID NO: 427+428, SEQ ID NO: 437+438, SEQ ID NO: 447+448, SEQ ID NO: 457+458, SEQ ID NO: 467+468, SEQ ID NO: 477+478, SEQ ID NO: 487+488, SEQ ID NO: 497+498, SEQ ID NO: 507+508, SEQ ID NO: 517+518, SEQ ID NO: 527+528, SEQ ID NO: 537+538, SEQ ID NO: 547+548, SEQ ID NO: 557+558, SEQ ID NO: 567+568, SEQ ID NO: 577+578, SEQ ID NO: 587+588, SEQ ID NO: 597+598, SEQ ID NO: 607+608, SEQ ID NO: 617+618, SEQ ID NO: 627+628, SEQ ID NO: 637+638, SEQ ID NO: 647+648, SEQ ID NO: 657+658, SEQ ID NO: 667+668, SEQ ID NO: 677+678, SEQ ID NO: 687+688, SEQ ID NO: 697+698, SEQ ID NO: 707+708, SEQ ID NO: 717+718, SEQ ID NO: 727+728, SEQ ID NO: 737+738, SEQ ID NO: 747+748, SEQ ID NO: 757+758, SEQ ID NO: 767+768, SEQ ID NO: 777+778, SEQ ID NO: 787+788, SEQ ID NO: 797+798, SEQ ID NO: 807+808, SEQ ID NO: 817+818, SEQ ID NO: 827+828, SEQ ID NO: 837+838, SEQ ID NO: 847+848, SEQ ID NO: 857+858, SEQ ID NO: 867+868, SEQ ID NO: 877+878, SEQ ID NO: 887+888, SEQ ID NO: 897+898, SEQ ID NO: 907+908, SEQ ID NO: 917+918, SEQ ID NO: 927+928, SEQ ID NO: 937+938, SEQ ID NO: 947+948, SEQ ID NO: 957+958, SEQ ID NO: 967+968, SEQ ID NO: 977+978, and SEQ ID NO: 987+988, particularly SEQ ID Nos: 727+728, 767+568, 757+758, preferably SEQ ID NO: 727+728.
   (xi) The combination product for the treatment of and optionally also for the prevention, prophylaxis, or reduction of adverse events associated with immunotherapy, particularly cancer immunotherapy, more particularly of AML, with an antibody construct comprising at least one domain which binds selectively to FLT3 on the surface of a target cell, and at least one other domain which binds to CD3, preferably human CD3, on the surface of a T cell according to embodiments (i) to (x) of Sub-Aspect A-3, comprising
[0122] (a) at least one antibody construct referred to in the preamble, and
[0123] (b) an inhibitor/antagonist of TNF/TNFR that reduces TNF/TNFR signaling,
   wherein said inhibitor/antagonist of TNF/TNFR that reduces TNF/TNFR signaling referred to in (b) is for administration to a patient prior to and optionally also following administration of said antibody construct referred to in (a), wherein the domain which binds to FLT3 comprises a polypeptide selected from the group consisting of those depicted in SEQ ID NO: 349, SEQ ID NO: 359, SEQ ID NO: 369, SEQ ID NO: 379, SEQ ID NO: 389, SEQ ID NO: 399, SEQ ID NO: 409, SEQ ID NO: 419, SEQ ID NO: 429, SEQ ID NO: 439, SEQ ID NO: 449, SEQ ID NO: 459, SEQ ID NO: 469, SEQ ID NO: 479, SEQ ID NO: 489, SEQ ID NO: 499, SEQ ID NO: 509, SEQ ID NO: 519, SEQ ID NO: 529, SEQ ID NO: 539, SEQ ID NO: 549, SEQ ID NO: 559, SEQ ID NO: 569, SEQ ID NO: 579, SEQ ID NO: 589, SEQ ID NO: 599, SEQ ID NO: 609, SEQ ID NO: 619, SEQ ID NO: 629, SEQ ID NO: 639, SEQ ID NO: 649, SEQ ID NO: 659, SEQ ID NO: 669, SEQ ID NO: 679, SEQ ID NO: 689, SEQ ID NO: 699, SEQ ID NO: 709, SEQ ID NO: 719, SEQ ID NO: 729, SEQ ID NO: 739, SEQ ID NO: 749, SEQ ID NO: 759, SEQ ID NO: 769, SEQ ID NO: 779, SEQ ID NO: 789, SEQ ID NO: 799, SEQ ID NO: 809, SEQ ID NO: 819, SEQ ID NO: 829, SEQ ID NO: 839, SEQ ID NO: 849, SEQ ID NO: 859, SEQ ID NO: 869, SEQ ID NO: 879, SEQ ID NO: 889, SEQ ID NO: 899, SEQ ID NO: 909, SEQ ID NO: 919, SEQ ID NO: 929, SEQ ID NO: 939, SEQ ID NO: 949, SEQ ID NO: 959, SEQ ID NO: 969, SEQ ID NO: 979, and SEQ ID NO: 989 particularly SEQ ID NOS: 729, 759, 569, preferably SEQ ID NO: 729.
   (xii) The combination product for the treatment of and optionally also for the prevention, prophylaxis, or reduction of adverse events associated with immunotherapy, particularly cancer immunotherapy, more particularly of AML, with an antibody construct comprising at least one domain which binds selectively to FLT3 on the surface of a target cell, and at least one other domain which binds to CD3, preferably human CD3, on the surface of a T cell according to embodiments (i) to (x) of Sub-Aspect A-3, comprising
[0124] (a) at least one antibody construct referred to in the preamble, and
[0125] (b) an inhibitor/antagonist of TNF/TNFR that reduces TNF/TNFR signaling,
   wherein said inhibitor/antagonist of TNF/TNFR that reduces TNF/TNFR signaling referred to in (b) is for administration to a patient prior to and optionally also following administration of said antibody construct referred to in (a), wherein the domain which binds to FLT3 comprises binding to CD3 and FLT3 as used herein may be selected, for example, from the group comprising SEQ ID Nos: 350, 360, 370, 380, 390, 400, 410, 420, 430, 440, 450, 460, 470, 480, 490, 500, 510, 520, 530, 540, 550, 560, 570, 580, 590, 600, 610, 620, 630, 640, 650, 660, 670, 680, 690, 700, 710, 720, 730, 740, 750, 760, 770, 780, 790, 800, 810, 820, 830, 840, 850, 860, 870, 880, 890, 900, 910, 920, 930, 940, 950, 960, 970, 980, and 990, preferably SEQ ID NO: 730.

### Sub-Aspect A-4—Constructs Binding PSMA in Combination Products of the Invention

[0126] In accordance with the present invention, antibody constructs binding to CD3 and PSMA comprise those exemplified in WO2017134158, the contents of which are hereby incorporated by reference.

[0127] Several markers for prostate cancer have been identified, including e.g. prostate-specific antigen (PSA), the six transmembrane epithelial antigen of the prostate (STEAP) (Hubert et al., PNAS 96 (1999), 14523-14528), the prostate stem cell antigen (PSCA) (Reiter et al., Proc. Nat. Acad. Sci. 95: 1735-1740, 1998) and the prostate-specific membrane antigen (PSMA; PSM) (Israeli et al., Cancer Res. 53 (1993).

[0128] PSMA was originally defined by the monoclonal antibody (MAb) 7E11 derived from immunization with a partially purified membrane preparation from the lymph node prostatic adenocarcinoma (LNCaP) cell line (Horoszewicz et al., Anticancer Res. 7 (1987), 927-35). A 2.65-kb cDNA fragment encoding the PSMA protein was cloned and subsequently mapped to chromosome 1 1 p1 1 0.2 (Israeli et al., loc. cit; O'Keefe et al., Biochem. Biophys. Acta 1443 (1998), 1 13-127). Initial analysis of PSMA demonstrated widespread expression within the cells of the prostatic secretory epithelium. Immunohistochemical staining demonstrated that PSMA was absent to moderately expressed in hyperplastic and benign tissues, while malignant tissues stained with the greatest intensity (Horoszewicz et al., loc. cit.). Consistent with the correlation between PSMA expression and tumor stage, increased levels of PSMA are associated with androgen-independent prostate cancer (PCa). Analysis of tissue samples from patients with prostate cancer has demonstrated elevated PSMA levels after physical castration or androgen-deprivation therapy. Unlike expression of prostate specific antigen, which is downregulated after androgen ablation, PSMA expression is significantly increased in both primary and metastatic tumor specimens (Kawakami et al., Wright et al., loc. cit.). PSMA is also highly expressed in secondary prostatic tumors and occult metastatic disease. Immunohistochemical analysis has revealed relatively intense and homogeneous expression of PSMA within metastatic lesions localized to lymph nodes, bone, soft tissue, and lungs compared with benign prostatic tissues (Chang et al. (2001), loc. cit.; Murphy et al., Cancer 78 (1996), 809-818; Sweat et al., loc. cit.). PSMA is also expressed in the tumor-associated neovasculature of most solid cancers examined yet is absent in the normal vascular endothelium (Chang et al. (1999), Liu et al., Silver et al., loc. cit.). Although the significance of PSMA expression within the vasculature is unknown, the specificity for tumor-associated endothelium makes PSMA a potential target for the treatment of many forms of malignancy.

[0129] According to the present invention, the combination product for the treatment of and optionally also for the prevention, prophylaxis, or reduction of adverse events associated with immunotherapy, particularly cancer immunotherapy, particularly of prostate cancer and cancers originating therefrom, which comprise antibody constructs having a PSMA binding domain correspond to PSMA binders, wherein each may be a polypeptide monomer that has an amino acid sequence that is at least 90% identical to, or consists of, a sequence selected from the group consisting of: SEQ ID NO: 17-24 in the Sequence Listing in WO2017134158, which is hereby incorporated explicitly be reference. Further, the PSMA binding domain may have an amino acid sequence selected from the group consisting of SEQ ID NOs: 50, 56, 68, 74, 86, 92, 104, 1 10, 122, 128, 140, 146, 158, 164, 176, 182, 194, 200, 212, 218, 230, 236, 248, 254, 266, 272, 284, 290, 302, 308, 320, 335, 350, 365, 380, 395, 410, 425, 440, 455, 470 in the sequence listing disclosed in WO2017134158, which are also incorporated by reference.

[0130] The combination products comprising the antibody constructs according to this and related sub-aspects of the present invention are particularly suitable for the treatment of and optionally also for use in the prevention, treatment or amelioration of a proliferative disease, a tumorous disease, cancer or an immunological disorder, particularly wherein the disease is prostate cancer, more particularly prostate cancer that is characterized by an increased expression of PSMA on the surface of target cells, and wherein said inhibitor/antagonist of TNF/TNFR that reduces TNF/TNFR signaling referred to in (b) is for administration to a patient prior to administration of said antibody construct.

[0131] It is envisaged for the antibody construct used in combination products comprising the antibody constructs according to the present invention are particularly suitable for the treatment of and optionally also for use in the prevention, treatment or amelioration of a disease selected from a proliferative disease, a tumorous disease, cancer or an immunological disorder, particularly wherein the disease is prostate cancer, more particularly prostate cancer that is characterized by an increased expression of PSMA on the surface of target cells, that the domain which binds to PSMA, preferably human PSMA, comprises a VL region comprising CDR-L1, CDR-L2 and CDR-L3 selected from: CDR-L1 as depicted in SEQ ID NO:997, CDR-L2 as depicted in SEQ ID NO: 998, and CDR-L3 as depicted in SEQ ID NO: 999; CDR-L1 as depicted in SEQ ID NO: 1012, CDR-L2 as depicted in SEQ ID NO: 1013, and CDR-L3 as depicted in SEQ ID NO: 1014; and CDR-L1 as depicted in SEQ ID NO: 1027, CDR-L2 as depicted in SEQ ID NO: 1028, and CDR-L3 as depicted in SEQ ID NO: 1029.

[0132] It is envisaged for the antibody construct used in combination products comprising the antibody constructs according to the present invention are particularly for the treatment of and optionally also for use in the prevention, treatment or amelioration of a disease selected from a proliferative disease, a tumorous disease, cancer or an immunological disorder, particularly wherein the disease is prostate cancer, more particularly prostate cancer that is characterized by an increased expression of PSMA on the surface of target cells, that the domain which binds to PSMA, preferably human PSMA, comprises a VH region comprising CDR-H1, CDR-H2 and CDR-H3 selected from: CDR-H1 as depicted in SEQ ID NO: 994, CDR-H2 as depicted in SEQ ID NO: 995, and CDR-H3 as depicted in SEQ ID NO: 996; CDR-H1 as depicted in SEQ ID NO: 1009, CDR-H2 as depicted in SEQ ID NO: 1010, and CDR-H3 as depicted in SEQ ID NO: 1011, CDR-H1 as depicted in SEQ ID NO: 1024, CDR-H2 as depicted in SEQ ID NO: 1025, and CDR-H3 as depicted in SEQ ID NO: 1026.

[0133] It is envisaged for the antibody construct used in combination products comprising the antibody constructs according to the present invention are particularly for the treatment of and optionally also for use in the prevention, treatment or amelioration of a disease selected from a proliferative disease, a tumorous disease, cancer or an immunological disorder, particularly wherein the disease is prostate cancer, more particularly prostate cancer that is characterized by an increased expression of PSMA on the surface of target cells, that the domain which binds to PSMA, preferably human PSMA, comprises a VL region comprising CDR-L1, CDR-L2 and CDR-L3 and a VH region comprising CDR-H1, CDR-H2 and CDR-H3 selected from: CDR-L1 as depicted in SEQ ID NO:997, CDR-L2 as depicted in SEQ ID NO: 998, and CDR-L3 as depicted in SEQ ID NO: 999; CDR-L1 as depicted in SEQ ID NO: 1012, CDR-L2 as depicted in SEQ ID NO: 1013, and CDR-L3 as depicted in SEQ ID NO: 1014; and CDR-L1 as depicted in SEQ ID NO: 1027, CDR-L2 as depicted in SEQ ID NO: 1028, and CDR-L3 as depicted in SEQ ID NO: 1029, and CDR-H1 as depicted in SEQ ID NO: 994, CDR-H2 as depicted in SEQ ID NO: 995, and CDR-H3 as depicted in SEQ ID NO: 996; CDR-H1 as depicted in SEQ ID NO: 1009, CDR-H2 as depicted in SEQ ID NO: 1010, and CDR-H3 as depicted in SEQ ID NO: 1011, CDR-H1 as depicted in SEQ ID NO: 1024, CDR-H2 as depicted in SEQ ID NO: 1025, and CDR-H3 as depicted in SEQ ID NO: 1026.

[0134] It is envisaged for the antibody construct used in combination products comprising the antibody constructs according to the present invention are particularly for the treatment of and optionally also for use in the prevention, treatment or amelioration of a disease selected from a proliferative disease, a tumorous disease, cancer or an immunological disorder, particularly wherein the disease is prostate cancer, more particularly prostate cancer that is characterized by an increased expression of PSMA on the surface of target cells, that the domain which binds to PSMA, preferably human PSMA, comprises a VL region selected from the group of VL regions as depicted in any one of SEQ ID NO: 1001, SEQ ID NO: 1016, and SEQ ID NO: 1031.

[0135] It is envisaged for the antibody construct used in combination products comprising the antibody constructs according to the present invention are particularly for the treatment of and optionally also for use in the prevention, treatment or amelioration of a disease selected from a proliferative disease, a tumorous disease, cancer or an immunological disorder, particularly wherein the disease is prostate cancer, more particularly prostate cancer that is characterized by an increased expression of PSMA on the surface of target cells, that the domain which binds to PSMA, preferably human PSMA, comprises a VH region selected from the group consisting of a VH region as depicted in any one of SEQ ID NO: 1000, SEQ ID NO: 1015, and SEQ ID NO: 1030.

[0136] It is envisaged for the antibody construct used in combination products comprising the antibody constructs according to the present invention are particularly for the treatment of and optionally also for use in the prevention, treatment or amelioration of a disease selected from a proliferative disease, a tumorous disease, cancer or an immunological disorder, particularly wherein the disease is prostate cancer, more particularly prostate cancer that is characterized by an increased expression of PSMA on the surface of target cells, that the domain which binds to PSMA, preferably human PSMA, comprises a VL region and a VH region selected from the group consisting of a VL region as depicted in SEQ ID NO: 1001, SEQ ID NO: 1016, or SEQ ID NO: 1031 and a VH region as depicted in SEQ ID NO: SEQ ID NO: 1000, SEQ ID NO: 1015, or SEQ ID NO: 1030.

[0137] It is also envisaged for the antibody construct used in accordance with the present invention that the domain which selectively binds to an epitope of PSMA that it competes with those explicitly recited herein, i.e. those characterized by specific SEQ ID Nos. Whether or not an antibody construct binds to the same epitope of PSMA as another given antibody construct can be measured e.g. by epitope mapping with chimeric or truncated target molecules, e.g. as described herein above and in the Examples in WO2017021362. Further, whether an antibody construct competes for binding with another given antibody construct can be measured in a competition assay such as a competitive ELISA or a cell-based competition assay. Avidin-coupled microparticles (beads) can also be used. Like an avidin-coated ELISA plate, when reacted with a biotinylated protein, each of these beads can be used as a substrate on which an assay can be performed. Antigen is coated onto a bead and then precoated with the first antibody. The second antibody is added, and any additional binding is determined. Possible means for the read-out includes flow cytometry.

[0138] The antibody constructs binding to PSMA as disclosed above are intended for use in the prevention, prophylaxis, treatment or amelioration of a cancer disease, particularly of prostate cancer or a metastatic cancer disease derived from prostate cancer, and are part of combination products, kits, etc., and/or may be used in or administered in steps of the methods according to the present invention, i.e. together with an inhibitor/antagonist of TNF/TNFR that reduces TNF/TNFR signaling, wherein said inhibitor/antagonist of TNF/TNFR that reduces TNF/TNFR signaling (b) is administered to a patient in need thereof prior to administration of said antibody construct (a), wherein the patient is preferably a human being or a non-human primate, and wherein said inhibitor/antagonist is administered to prevent or reduce cytokine release syndrome (CRS) or other adverse effects associated with administration of a CD3-binding construct as disclosed throughout the present invention and as set out below:

(i) The combination product for the treatment of and optionally also for the prevention, prophylaxis or reduction of adverse events associated with immunotherapy, particularly cancer immunotherapy, with an antibody construct comprising at least one domain (also referred to as “first domain”) which binds to a target antigen on the surface of a target cell, and at least one other domain (also referred to as “second domain”) which binds to CD3, preferably human CD3, on the surface of a T cell according to any one of embodiments (i) to (xiv) of general Aspect A), comprising
[0139] (a) at least one antibody construct referred to in the preamble, and
[0140] (b) an inhibitor/antagonist of TNF/TNFR that reduces TNF/TNFR signaling,
   wherein said inhibitor/antagonist of TNF/TNFR that reduces TNF/TNFR signaling referred to in (b) is for administration to a patient prior to and optionally also following administration of said antibody construct referred to in (a), wherein the domain binds selectively to human PSMA (SEQ ID NO: 993) as disclosed in WO2017134158, more particularly, as disclosed in the sequence listing in WO2017134158, herein preferably those CDRs, VLs, VHs, and antibody constructs shown in SEQ ID Nos: 42 to 474, which selectively bind to PSMA epitopes.
   (ii) The combination product for the treatment of and optionally also for the prevention, prophylaxis or reduction of adverse events associated with immunotherapy, particularly cancer immunotherapy, with an antibody construct comprising at least one domain which binds to PSMA on the surface of a target cell, and at least one other domain which binds to CD3, preferably human CD3, on the surface of a T cell according to embodiment (i) of Sub-Aspect A-4, comprising
[0141] (a) at least one antibody construct referred to in the preamble, and
[0142] (b) an inhibitor/antagonist of TNF/TNFR that reduces TNF/TNFR signaling,
   wherein said inhibitor/antagonist of TNF/TNFR that reduces TNF/TNFR signaling referred to in (b) is for administration to a patient prior to and optionally also following administration of said antibody construct referred to in (a), wherein said antibody construct binds to an epitope that is selectively bound by an antibody/antibody construct that has the following CDRs of the VH chain and/or VL chain respectively: CDR-L1 as depicted in SEQ ID NO:997, CDR-L2 as depicted in SEQ ID NO: 998, and CDR-L3 as depicted in SEQ ID NO: 999; CDR-L1 as depicted in SEQ ID NO: 1012, CDR-L2 as depicted in SEQ ID NO: 1013, and CDR-L3 as depicted in SEQ ID NO: 1014; CDR-L1 as depicted in SEQ ID NO: 1027, CDR-L2 as depicted in SEQ ID NO: 1028, and CDR-L3 as depicted in SEQ ID NO: 1029, and/or CDR-H1 as depicted in SEQ ID NO: 994, CDR-H2 as depicted in SEQ ID NO: 995, and CDR-H3 as depicted in SEQ ID NO: 996; CDR-H1 as depicted in SEQ ID NO: 1009, CDR-H2 as depicted in SEQ ID NO: 1010, and CDR-H3 as depicted in SEQ ID NO: 1011, CDR-H1 as depicted in SEQ ID NO: 1024, CDR-H2 as depicted in SEQ ID NO: 1025, and CDR-H3 as depicted in SEQ ID NO: 1026.
   (iii) The combination product for the treatment of and optionally also for the prevention or reduction, prophylaxis of adverse events associated with immunotherapy, particularly cancer immunotherapy, with an antibody construct comprising at least one domain which binds to PSMA on the surface of a target cell, and at least one other domain which binds to CD3, preferably human CD3, on the surface of a T cell according to embodiment (i) and/or (ii) of Sub-Aspect A-4, comprising
[0143] (a) at least one antibody construct referred to in the preamble, and
[0144] (b) an inhibitor/antagonist of TNF/TNFR that reduces TNF/TNFR signaling,
   wherein said inhibitor/antagonist of TNF/TNFR that reduces TNF/TNFR signaling referred to in (b) is for administration to a patient prior to and optionally also following administration of said antibody construct referred to in (a), wherein said antibody construct binds to an epitope that is selectively bound by an antibody/antibody construct that has the following CDRs of the VH chain and/or VL chain respectively: CDR-H1 as depicted in SEQ ID NO: 994, CDR-H2 as depicted in SEQ ID NO: 995, and CDR-H3 as depicted in SEQ ID NO: 996; CDR-L1 as depicted in SEQ ID NO:997, CDR-L2 as depicted in SEQ ID NO: 998, and CDR-L3 as depicted in SEQ ID NO: 999; CDR-H1 as depicted in SEQ ID NO: 1009, CDR-H2 as depicted in SEQ ID NO: 1010, and CDR-H3 as depicted in SEQ ID NO: 1011, CDR-L1 as depicted in SEQ ID NO: 1012, CDR-L2 as depicted in SEQ ID NO: 1013, and CDR-L3 as depicted in SEQ ID NO: 1014; and CDR-H1 as depicted in SEQ ID NO: 1024, CDR-H2 as depicted in SEQ ID NO: 1025, and CDR-H3 as depicted in SEQ ID NO: 1026, CDR-L1 as depicted in SEQ ID NO: 1027, CDR-L2 as depicted in SEQ ID NO: 1028, and CDR-L3 as depicted in SEQ ID NO: 1029.
   (iv) The combination product for the treatment of and optionally also for the prevention, prophylaxis or reduction of adverse events associated with immunotherapy, particularly cancer immunotherapy, with an antibody construct comprising at least one domain which binds to PSMA on the surface of a target cell, and at least one other domain which binds to CD3, preferably human CD3, on the surface of a T cell according to embodiment (i) of Sub-Aspect A-4, comprising
[0145] (a) at least one antibody construct referred to in the preamble, and
[0146] (b) an inhibitor/antagonist of TNF/TNFR that reduces TNF/TNFR signaling,
   wherein said inhibitor/antagonist of TNF/TNFR that reduces TNF/TNFR signaling referred to in (b) is for administration to a patient prior to and optionally also following administration of said antibody construct referred to in (a), wherein said antibody construct has the following CDRs of the VH chain and/or VL chain respectively: CDR-L1 as depicted in SEQ ID NO:997, CDR-L2 as depicted in SEQ ID NO: 998, and CDR-L3 as depicted in SEQ ID NO: 999; CDR-L1 as depicted in SEQ ID NO: 1012, CDR-L2 as depicted in SEQ ID NO: 1013, and CDR-L3 as depicted in SEQ ID NO: 1014; CDR-L1 as depicted in SEQ ID NO: 1027, CDR-L2 as depicted in SEQ ID NO: 1028, and CDR-L3 as depicted in SEQ ID NO: 1029, and/or CDR-H1 as depicted in SEQ ID NO: 994, CDR-H2 as depicted in SEQ ID NO: 995, and CDR-H3 as depicted in SEQ ID NO: 996; CDR-H1 as depicted in SEQ ID NO: 1009, CDR-H2 as depicted in SEQ ID NO: 1010, and CDR-H3 as depicted in SEQ ID NO: 1011, CDR-H1 as depicted in SEQ ID NO: 1024, CDR-H2 as depicted in SEQ ID NO: 1025, and CDR-H3 as depicted in SEQ ID NO: 1026.
   (v) The combination product for the treatment of and optionally also for the prevention, prophylaxis or reduction of adverse events associated with immunotherapy, particularly cancer immunotherapy, with an antibody construct comprising at least one domain which binds to PSMA on the surface of a target cell, and at least one other domain which binds to CD3, preferably human CD3, on the surface of a T cell according to embodiment (i) to (iii) of Sub-Aspect A-4, comprising
[0147] (a) at least one antibody construct referred to in the preamble, and
[0148] (b) an inhibitor/antagonist of TNF/TNFR that reduces TNF/TNFR signaling,
   wherein said inhibitor/antagonist of TNF/TNFR that reduces TNF/TNFR signaling referred to in (b) is for administration to a patient prior to and optionally also following administration of said antibody construct referred to in (a), wherein said antibody construct has the following CDRs of the VH chain and/or VL chain respectively: CDR-H1 as depicted in SEQ ID NO: 994, CDR-H2 as depicted in SEQ ID NO: 995, and CDR-H3 as depicted in SEQ ID NO: 996; CDR-L1 as depicted in SEQ ID NO:997, CDR-L2 as depicted in SEQ ID NO: 998, and CDR-L3 as depicted in SEQ ID NO: 999; CDR-H1 as depicted in SEQ ID NO: 1009, CDR-H2 as depicted in SEQ ID NO: 1010, and CDR-H3 as depicted in SEQ ID NO: 1011, CDR-L1 as depicted in SEQ ID NO: 1012, CDR-L2 as depicted in SEQ ID NO: 1013, and CDR-L3 as depicted in SEQ ID NO: 1014; and CDR-H1 as depicted in SEQ ID NO: 1024, CDR-H2 as depicted in SEQ ID NO: 1025, and CDR-H3 as depicted in SEQ ID NO: 1026, CDR-L1 as depicted in SEQ ID NO: 1027, CDR-L2 as depicted in SEQ ID NO: 1028, and CDR-L3 as depicted in SEQ ID NO: 1029.
   (vi) The combination product for the treatment of and optionally also for the prevention, prophylaxis or reduction of adverse events associated with immunotherapy, particularly cancer immunotherapy, with an antibody construct comprising at least one domain which binds to PSMA on the surface of a target cell, and at least one other domain which binds to CD3, preferably human CD3, on the surface of a T cell according to embodiment (i) to (iv) of Sub-Aspect A-4, comprising a VL region selected from the group of VL regions as depicted in any one of SEQ ID NO: 1001, SEQ ID NO: 1016, and SEQ ID NO: 1031.
   (vii) The combination product for the treatment of and optionally also for the prevention, prophylaxis or reduction of adverse events associated with immunotherapy, particularly cancer immunotherapy, with an antibody construct comprising at least one domain which binds to PSMA on the surface of a target cell, and at least one other domain which binds to CD3, preferably human CD3, on the surface of a T cell according to embodiment (i) to (v) of Sub-Aspect A-4, comprising a VH region selected from the group consisting of a VH region as depicted in any one of SEQ ID NO: 1000, SEQ ID NO: 1015, and SEQ ID NO: 1030.
   (viii) The combination product for the treatment of and optionally also for the prevention, prophylaxis or reduction of adverse events associated with immunotherapy, particularly cancer immunotherapy, with an antibody construct comprising at least one domain which binds to PSMA on the surface of a target cell, and at least one other domain which binds to CD3, preferably human CD3, on the surface of a T cell according to embodiment (i) to (vii) of Sub-Aspect A-4, comprising a VL region that binds to an epitope that is that is selectively bound by an antibody/antibody construct comprising a VL region selected from the group comprising VL regions as depicted in any one of SEQ ID NO: 1001, SEQ ID NO: 1016, and SEQ ID NO: 1031.
   (ix) The combination product for the treatment of and optionally also for the prevention, prophylaxis or reduction of adverse events associated with immunotherapy, particularly cancer immunotherapy, with an antibody construct comprising at least one domain which binds to PSMA on the surface of a target cell, and at least one other domain which binds to CD3, preferably human CD3, on the surface of a T cell according to embodiment (i) to (vii) of Sub-Aspect A-4, comprising a VH region that binds to an epitope that is that is selectively bound by an antibody/antibody construct comprising a VH region selected from the group comprising a VH region as depicted in any one of SEQ ID NO: 1000, SEQ ID NO: 1015, and SEQ ID NO: 1030.
   (x) The combination product for the treatment of and optionally also for the prevention, prophylaxis or reduction of adverse events associated with immunotherapy, particularly cancer immunotherapy, with an antibody construct comprising at least one domain which binds to PSMA on the surface of a target cell, and at least one other domain which binds to CD3, preferably human CD3, on the surface of a T cell according to embodiment (i) to (x) of Sub-Aspect A-4, comprising a VL region and a VH region selected from the group consisting of a VL region as depicted in SEQ ID NO: 1001, SEQ ID NO: 1016, or SEQ ID NO: 1031 and a VH region as depicted in SEQ ID NO: SEQ ID NO: 1000, SEQ ID NO: 1015, or SEQ ID NO: 1030.
   (xi) The combination product for the treatment of and optionally also for the prevention, prophylaxis or reduction of adverse events associated with immunotherapy, particularly cancer immunotherapy, with an antibody construct comprising at least one domain which binds to PSMA on the surface of a target cell, and at least one other domain which binds to CD3, preferably human CD3, on the surface of a T cell according to embodiment (i) to (x) of Sub-Aspect A-4, comprising a pair of a VL region and a VH region that binds to an epitope to an epitope that is that is selectively bound by an antibody/antibody construct that is selected from the group consisting of a pair of a VL region as depicted in SEQ ID NO: 1001, SEQ ID NO: 1016, or SEQ ID NO: 1031 and a VH region as depicted in SEQ ID NO: SEQ ID NO: 1000, SEQ ID NO: 1015, or SEQ ID NO: 1030.
   (xii) The combination product for the treatment of and optionally also for the prevention, prophylaxis or reduction of adverse events associated with immunotherapy, particularly cancer immunotherapy, with an antibody construct comprising at least one domain which binds to PSMA on the surface of a target cell, and at least one other domain which binds to CD3, preferably human CD3, on the surface of a T cell according to embodiment (i) to (x) of Sub-Aspect A-4,
   (xiii) The combination product for the treatment of and optionally also for the prevention, prophylaxis or reduction of adverse events associated with immunotherapy, particularly cancer immunotherapy, with an antibody construct comprising at least one domain which binds to PSMA on the surface of a target cell, and at least one other domain which binds to CD3, preferably human CD3, on the surface of a T cell according to embodiment (i) to (xi) of Sub-Aspect A-4, comprising
[0149] (a) at least one antibody construct referred to in the preamble, and
[0150] (b) an inhibitor/antagonist of TNF/TNFR that reduces TNF/TNFR signaling,
   wherein said inhibitor/antagonist of TNF/TNFR that reduces TNF/TNFR signaling referred to in (b) is for administration to a patient prior to and optionally also following administration of said antibody construct referred to in (a), wherein the domain which binds to PSMA comprises a polypeptide selected from the group consisting of those depicted in SEQ ID NO: 1002, SEQ ID NO: 1017, and SEQ ID NO: 1032, and/or binds to an epitope selectively bound by a polypeptide selected from the group consisting of those depicted in SEQ ID NO: 1002, SEQ ID NO: 1017, and SEQ ID NO: 1032.
   (xiv) The combination product for the treatment of and optionally also for the prevention, prophylaxis or reduction of adverse events associated with immunotherapy, particularly cancer immunotherapy, with an antibody construct comprising at least one domain which binds to PSMA on the surface of a target cell, and at least one other domain which binds to CD3, preferably human CD3, on the surface of a T cell according to embodiment (i) to (x) of Sub-Aspect A-4, comprising
[0151] (a) at least one antibody construct referred to in the preamble, and
[0152] (b) an inhibitor/antagonist of TNF/TNFR that reduces TNF/TNFR signaling,
   wherein said inhibitor/antagonist of TNF/TNFR that reduces TNF/TNFR signaling referred to in (b) is for administration to a patient prior to and optionally also following administration of said antibody construct referred to in (a), wherein the domain which binds to PSMA is comprised by a polypeptide selected from the group comprising antibody constructs depicted in SEQ ID Nos: 1003, 1004, 1005, 1006, 1007, 1008, 1018, 1019, 1020, 1021, 1022, 1023, 1033, 1034, 1035, 1036, 1037, and 1038, and/or binds to an epitope selectively bound by a polypeptide selected from the group comprising antibody constructs depicted in SEQ ID NOs: 1003, 1004, 1005, 1006, 1007, 1008, 1018, 1019, 1020, 1021, 1022, 1023, 1033, 1034, 1035, 1036, 1037, and 1038.

### Sub-Aspect A-5—Constructs Binding DLL3 in Combination Products of the Invention

[0153] In accordance with the present invention, antibody constructs binding to CD3 and DLL3 comprise those exemplified in WO2017021349, the contents of which are hereby incorporated by reference.

[0154] As used herein, the DLL3 binding antibody constructs are exemplified by the selective DLL3-binding sequences disclosed explicitly in WO2017021349 and in WO2019200007, both of which are hereby incorporated by reference in their entireties. The protein sequences of different isotypes of DLL3 are shown in SEQ ID Nos: 29 and 30 of WO2017021349, respectively. The DLL3 targeting domains comprise the CDR sequences explicitly disclosed in SEQ ID Nos: 42-69.

[0155] The cancer immunotherapy, wherein DLL3 is targeted and for which combination products, kits, uses and methods are envisioned in accordance with the present invention are immunotherapies, wherein the cancer is adrenal, liver, kidney, bladder, breast, gastric, ovarian, cervical, uterine, esophageal, colorectal, prostate (e.g., prostate adenocarcinoma), pancreatic, lung (both small cell and non-small cell), thyroid, carcinomas, sarcomas, glioblastomas, head and neck tumors, large cell neuroendocrine carcinoma (LCNEC), medullary thyroid cancer, glioblastoma, neuroendocrine prostate cancer, (NEPC), high-grade gastroenteropancreatic cancer (GEP) and malignant melanoma, preferably, wherein the cancer is small cell lung cancer.

[0156] It is also envisaged for the antibody construct used in accordance with the present invention that the domain which selectively binds to an epitope of DLL3 that it competes with those explicitly recited herein below, i.e. those characterized by specific SEQ ID Nos. Whether or not an antibody construct binds to the same epitope of DLL3 as another given antibody construct can be measured e.g. by epitope mapping with chimeric or truncated target molecules, e.g. as described herein above and in the Examples in WO2017021362. Further, whether an antibody construct competes for binding with another given antibody construct can be measured in a competition assay such as a competitive ELISA or a cell-based competition assay. Avidin-coupled microparticles (beads) can also be used. Like an avidin-coated ELISA plate, when reacted with a biotinylated protein, each of these beads can be used as a substrate on which an assay can be performed. Antigen is coated onto a bead and then precoated with the first antibody. The second antibody is added, and any additional binding is determined. Possible means for the read-out includes flow cytometry.

[0157] Further, antibody constructs comprising a binding domain which binds to human DLL3 on the surface of a target cell and a second binding domain which binds to CD3, preferably human CD3, on the surface of a T cell and at least macaque CD3 correspond to those, wherein the first binding domain binds to an epitope of DLL3 which is comprised within the region as depicted in SEQ ID NO: 260 as disclosed in WO2017021349.

[0158] The antibody constructs may have a binding domain that binds to an epitope of DLL3 which is comprised within the region as depicted in SEQ ID NO: 258 as disclosed in WO2017021349. The antibody constructs may have a binding domain that comprises a VH region comprising CDR-H1, CDR-H2 and CDR-H3 and a VL region comprising CDR-L1, CDR-L2 and CDR-L3 disclosed in the sequence listing in WO2017021349, which are selected from the group consisting of: CDR-H1 as depicted in SEQ ID NO: 1040, CDR-H2 as depicted in SEQ ID NO: 1041, CDR-H3 as depicted in SEQ ID NO: 1042, CDR-L1 as depicted in SEQ ID NO: 1043, CDR-L2 as depicted in SEQ ID NO: 1044 and CDR-L3 as depicted in SEQ ID NO: 1045; CDR-H1 as depicted in SEQ ID NO: 1046, CDR-H2 as depicted in SEQ ID NO: 1047, CDR-H3 as depicted in SEQ ID NO: 1048, CDR-L1 as depicted in SEQ ID NO: 1049, CDR-L2 as depicted in SEQ ID NO: 1050 and CDR-L3 as depicted in SEQ ID NO: 1051; CDR-H1 as depicted in SEQ ID NO: 1052, CDR-H2 as depicted in SEQ ID NO: 1053, CDR-H3 as depicted in SEQ ID NO: 1054, CDR-L1 as depicted in SEQ ID NO: 1055, CDR-L2 as depicted in SEQ ID NO: 1056 and CDR-L3 as depicted in SEQ ID NO: 1057; CDR-H1 as depicted in SEQ ID NO: 1058, CDR-H2 as depicted in SEQ ID NO: 1059, CDR-H3 as depicted in SEQ ID NO: 1060, CDR-L1 as depicted in SEQ ID NO: 1061, CDR-L2 as depicted in SEQ ID NO: 1062 and CDR-L3 as depicted in SEQ ID NO: 1063; CDR-H1 as depicted in SEQ ID NO: 1064, CDR-H2 as depicted in SEQ ID NO: 1065, CDR-H3 as depicted in SEQ ID NO: 1066, CDR-L1 as depicted in SEQ ID NO: 1067, CDR-L2 as depicted in SEQ ID NO: 1068 and CDR-L3 as depicted in SEQ ID NO: 1069; CDR-H1 as depicted in SEQ ID NO: 1070, CDR-H2 as depicted in SEQ ID NO: 1071, CDR-H3 as depicted in SEQ ID NO: 1072, CDR-L1 as depicted in SEQ ID NO: 1073, CDR-L2 as depicted in SEQ ID NO: 1074 and CDR-L3 as depicted in SEQ ID NO: 1075; CDR-H1 as depicted in SEQ ID NO: 1076, CDR-H2 as depicted in SEQ ID NO: 1077, CDR-H3 as depicted in SEQ ID NO: 1078, CDR-L1 as depicted in SEQ ID NO: 1079, CDR-L2 as depicted in SEQ ID NO: 1080 and CDR-L3 as depicted in SEQ ID NO: 1081; CDR-H1 as depicted in SEQ ID NO: 1082, CDR-H2 as depicted in SEQ ID NO: 1083, CDR-H3 as depicted in SEQ ID NO: 1084, CDR-L1 as depicted in SEQ ID NO: 1085, CDR-L2 as depicted in SEQ ID NO: 1086 and CDR-L3 as depicted in SEQ ID NO: 1087; and CDR-H1 as depicted in SEQ ID NO: 1088, CDR-H2 as depicted in SEQ ID NO: 1089, CDR-H3 as depicted in SEQ ID NO: 1090, CDR-L1 as depicted in SEQ ID NO: 1091, CDR-L2 as depicted in SEQ ID NO: 1092 and CDR-L3 as depicted in SEQ ID NO: 1093.

[0159] The antibody construct according to claim 5 or 6, wherein the first binding domain comprises a VH region selected from the group consisting of those depicted in SEQ ID NO: 1094, SEQ ID NO: 1095, SEQ ID NO: 1096, SEQ ID NO: 1097, SEQ ID NO: 1098, SEQ ID NO: 1099, SEQ ID NO: 1100, SEQ ID NO: 1101, SEQ ID NO: 1102, SEQ ID NO: 1103 and SEQ ID NO: 1104.

[0160] The antibody constructs may have a binding domain that comprises a VL region selected from the group consisting of those depicted in SEQ ID NO: 1105, SEQ ID NO: 1106, SEQ ID NO: 1107, SEQ ID NO: 1108, SEQ ID NO: 1109, SEQ ID NO: 1110, SEQ ID NO: 1111, SEQ ID NO: 1112, SEQ ID NO: 1113, SEQ ID NO: 1114 and SEQ ID NO: 1115.

[0161] The antibody constructs may have a binding domain that comprises a VH region and a VL region selected from the group consisting of pairs of a VH region and a VL region as depicted in SEQ ID NOs: 1094+1105; SEQ ID NOs: 1095+1106; SEQ ID NOs: 1096+1107; SEQ ID NOs: 1097+1108; SEQ ID NOs: 1098+1109; SEQ ID NOs: 1099+1110; SEQ ID NOs: 1100+1111; SEQ ID NOs: 1101+1112; SEQ ID NOs: 1102+1113; SEQ ID NOs: 1103+1114; and SEQ ID NOs: 1104+1115.

[0162] The antibody constructs may have a binding domain that comprises a polypeptide selected from the group consisting of those depicted in SEQ ID NO: 1116, SEQ ID NO: 1117, SEQ ID NO: 1118, SEQ ID NO: 1119, SEQ ID NO: 1120, SEQ ID NO: 1121, SEQ ID NO: 1122, SEQ ID NO: 1123, SEQ ID NO: 1124, SEQ ID NO: 1125 and SEQ ID NO: 1126.

[0163] The antibody constructs may have a binding domain that comprises a polypeptide selected from the group consisting of those depicted in SEQ ID NO: 1127, SEQ ID NO: 1128, SEQ ID NO: 1129, SEQ ID NO: 1130, SEQ ID NO: 1131, SEQ ID NO: 1132, SEQ ID NO: 1133, SEQ ID NO: 1134, SEQ ID NO: 1135, SEQ ID NO: 1136, SEQ ID NO: 1137, SEQ ID NO: 1139, SEQ ID NO: 1140, SEQ ID NO: 1141, SEQ ID NO: 1142, SEQ ID NO: 1143, SEQ ID NO: 1144 and SEQ ID NO: 1145.

[0164] The antibody constructs may have a binding domain that binds to an epitope of DLL3 which is comprised within the region as depicted in SEQ ID NO: 1146.

[0165] The antibody constructs may have a binding domain that comprises a VH region comprising CDR-H1, CDR-H2 and CDR-H3 and a VL region comprising CDR-L1, CDR-L2 and CDR-L3 selected from the group consisting of: CDR-H1 as depicted in SEQ ID NO: 1147, CDR-H2 as depicted in SEQ ID NO: 1148, CDR-H3 as depicted in SEQ ID NO: 1149, CDR-L1 as depicted in SEQ ID NO: 1150, CDR-L2 as depicted in SEQ ID NO: 1151 and CDR-L3 as depicted in SEQ ID NO: 1152; CDR-H1 as depicted in SEQ ID NO: 1153, CDR-H2 as depicted in SEQ ID NO: 1154, CDR-H3 as depicted in SEQ ID NO: 1155, CDR-L1 as depicted in SEQ ID NO: 1156, CDR-L2 as depicted in SEQ ID NO: 1157 and CDR-L3 as depicted in SEQ ID NO: 1158; CDR-H1 as depicted in SEQ ID NO: 1159, CDR-H2 as depicted in SEQ ID NO: 1160, CDR-H3 as depicted in SEQ ID NO: 1161, CDR-L1 as depicted in SEQ ID NO: 1162, CDR-L2 as depicted in SEQ ID NO: 1163 and CDR-L3 as depicted in SEQ ID NO: 1164; CDR-H1 as depicted in SEQ ID NO: 1165, CDR-H2 as depicted in SEQ ID NO: 1166, CDR-H3 as depicted in SEQ ID NO: 1167, CDR-L1 as depicted in SEQ ID NO: 1168, CDR-L2 as depicted in SEQ ID NO: 1169 and CDR-L3 as depicted in SEQ ID NO: 1170; CDR-H1 as depicted in SEQ ID NO: 1171, CDR-H2 as depicted in SEQ ID NO: 1172, CDR-H3 as depicted in SEQ ID NO: 1173, CDR-L1 as depicted in SEQ ID NO: 1174, CDR-L2 as depicted in SEQ ID NO: 1175 and CDR-L3 as depicted in SEQ ID NO: 1176; CDR-H1 as depicted in SEQ ID NO: 1153, CDR-H2 as depicted in SEQ ID NO: 1177, CDR-H3 as depicted in SEQ ID NO: 1155, CDR-L1 as depicted in SEQ ID NO: 1156, CDR-L2 as depicted in SEQ ID NO: 1157 and CDR-L3 as depicted in SEQ ID NO: 1158; CDR-H1 as depicted in SEQ ID NO: 1153, CDR-H2 as depicted in SEQ ID NO: 1178, CDR-H3 as depicted in SEQ ID NO: 1155, CDR-L1 as depicted in SEQ ID NO: 1156, CDR-L2 as depicted in SEQ ID NO: 1157 and CDR-L3 as depicted in SEQ ID NO: 1158; CDR-H1 as depicted in SEQ ID NO: 1153, CDR-H2 as depicted in SEQ ID NO: 1154, CDR-H3 as depicted in SEQ ID NO: 1155, CDR-L1 as depicted in SEQ ID NO: 1179, CDR-L2 as depicted in SEQ ID NO: 1157 and CDR-L3 as depicted in SEQ ID NO: 1158; CDR-H1 as depicted in SEQ ID NO: 1153, CDR-H2 as depicted in SEQ ID NO: 1154, CDR-H3 as depicted in SEQ ID NO: 1155, CDR-L1 as depicted in SEQ ID NO: 1180, CDR-L2 as depicted in SEQ ID NO: 1157 and CDR-L3 as depicted in SEQ ID NO: 1158; CDR-H1 as depicted in SEQ ID NO: 1153, CDR-H2 as depicted in SEQ ID NO: 1154, CDR-H3 as depicted in SEQ ID NO: 1155, CDR-L1 as depicted in SEQ ID NO: 1181, CDR-L2 as depicted in SEQ ID NO: 1157 and CDR-L3 as depicted in SEQ ID NO: 1158; CDR-H1 as depicted in SEQ ID NO: 1153, CDR-H2 as depicted in SEQ ID NO: 1154, CDR-H3 as depicted in SEQ ID NO: 1155, CDR-L1 as depicted in SEQ ID NO: 1182, CDR-L2 as depicted in SEQ ID NO: 1157 and CDR-L3 as depicted in SEQ ID NO: 1158; CDR-H1 as depicted in SEQ ID NO: 1153, CDR-H2 as depicted in SEQ ID NO: 1177, CDR-H3 as depicted in SEQ ID NO: 1155, CDR-L1 as depicted in SEQ ID NO: 1179, CDR-L2 as depicted in SEQ ID NO: 1157 and CDR-L3 as depicted in SEQ ID NO: 1158; and CDR-H1 as depicted in SEQ ID NO: 1153, CDR-H2 as depicted in SEQ ID NO: 1178, CDR-H3 as depicted in SEQ ID NO: 1155, CDR-L1 as depicted in SEQ ID NO: 1180, CDR-L2 as depicted in SEQ ID NO: 1157 and CDR-L3 as depicted in SEQ ID NO: 1158.

[0166] The antibody constructs may have a binding domain that comprises a VH region selected from the group consisting of those depicted in SEQ ID NO: 1183, SEQ ID NO: 1184, SEQ ID NO: 1185, SEQ ID NO: 1186, SEQ ID NO: 1187, SEQ ID NO: 1188, SEQ ID NO: 1189, SEQ ID NO: 1190, SEQ ID NO: 1191, SEQ ID NO: 1192, SEQ ID NO: 1193, SEQ ID NO: 1194, SEQ ID NO: 1195, SEQ ID NO: 1196, SEQ ID NO: 1197, and SEQ ID NO: 1198.

[0167] The antibody constructs may have a binding domain that comprises a VL region selected from the group consisting of those depicted in SEQ ID NO: 1199128, SEQ ID NO: 1200138, SEQ ID NO: 1201148, SEQ ID NO: 1202, SEQ ID NO: 1203, SEQ ID NO: 1204, SEQ ID NO: 1205, SEQ ID NO: 1206, SEQ ID NO: 1207, SEQ ID NO: 1208, SEQ ID NO: 1209, SEQ ID NO: 1210, SEQ ID NO: 1211, SEQ ID NO: 1212, SEQ ID NO: 1213, SEQ ID NO: 1214, SEQ ID NO: 1215, SEQ ID NO: 1216, SEQ ID NO: 1217, and SEQ ID NO: 1218.

[0168] The antibody constructs may have a binding domain that comprises a VH region and a VL region selected from the group consisting of pairs of a VH region and a VL region as depicted in SEQ ID NOs: 1183+1199; SEQ ID NOs: 1184+1200; SEQ ID NOs: 1185+1201; SEQ ID NOs: 1186+1202; SEQ ID NOs: 1187+1203; SEQ ID NOs 1184+1204; SEQ ID NOs 1184+1205; SEQ ID NOs 1184+12168; SEQ ID NOs 1184+1207; SEQ ID NOs 1184+1208; SEQ ID NOs 1188+1200; SEQ ID NOs 1189+1200; SEQ ID NOs 1190+1200; SEQ ID NOs 1188+1208; SEQ ID NOs 1191+1209; 1192+1210; SEQ ID NOs 1192+1210; SEQ ID NOs 1193+1211; SEQ ID NOs 1193+1212; SEQ ID NOs 1193+1213; SEQ ID NOs 1193+1214; SEQ ID NOs 1193+1215; SEQ ID NOs 1193+1216; SEQ ID NOs 1194+1211; SEQ ID NOs 1195+1211; SEQ ID NOs 1196+1211; SEQ ID NOs 1194+1216; SEQ ID NOs 1197+1217; and SEQ ID NOs 1198+1218.

[0169] The antibody constructs may have a binding domain that comprises a polypeptide selected from the group consisting of those depicted in SEQ ID NO: 1219, SEQ ID NO: 1220, SEQ ID NO: 1221, SEQ ID NO: 1222, SEQ ID NO: 1223, SEQ ID NO: 1224, SEQ ID NO: 1225, SEQ ID NO: 1226, SEQ ID NO: 1227, SEQ ID NO: 1228, SEQ ID NO: 1229476, SEQ ID NO: 1230, SEQ ID NO: 1231, SEQ ID NO: 1232, SEQ ID NO: 1233, SEQ ID NO: 1234, SEQ ID NO: 1235, SEQ ID NO: 1236, SEQ ID NO: 1237, SEQ ID NO: 1238, SEQ ID NO: 1239, SEQ ID NO: 1240, SEQ ID NO: 1241, SEQ ID NO: 1242, SEQ ID NO: 1243, SEQ ID NO: 1244, SEQ ID NO: 1245, and SEQ ID NO: 1246.

[0170] The antibody constructs may have a binding domain that comprising a polypeptide selected from the group consisting of those depicted in SEQ ID NO: 1247, SEQ ID NO: 1248, SEQ ID NO: 1249, SEQ ID NO: 1250, SEQ ID NO: 1251; SEQ ID NO: 1252, SEQ ID NO: 1253, SEQ ID NO: 1254, SEQ ID NO: 1255, SEQ ID NO: 1256, SEQ ID NO: 1257, SEQ ID NO: 1258, SEQ ID NO: 1259, SEQ ID NO: 1260, SEQ ID NO: 1261, SEQ ID NO: 1262, SEQ ID NO: 1263, SEQ ID NO: 1264, SEQ ID NO: 1265, SEQ ID NO: 1266, SEQ ID NO: 1267, SEQ ID NO: 1268, SEQ ID NO: 1269, SEQ ID NO: 1270, SEQ ID NO: 1271, SEQ ID NO: 1272, SEQ ID NO: 1273, SEQ ID NO: 1274, SEQ ID NO: 1275, SEQ ID NO: 1276, and SEQ ID NO: 1277.

[0171] The antibody constructs may have a binding domain comprising or consisting of a polypeptide selected from the group consisting of those depicted in SEQ ID NO: 1278, SEQ ID NO: 1279, SEQ ID NO: 1280, SEQ ID NO: 1281, SEQ ID NO: 1282, SEQ ID NO: 1283, SEQ ID NO: 1284, SEQ ID NO: 1285.

[0172] The antibody constructs binding to DLL3 as disclosed above are intended for use in the prevention, prophylaxis, treatment or amelioration of a cancer, particularly of a cancer referred to supra, and are part of combination products, kits, etc., and/or may be used in or administered in steps of the methods according to the present invention, i.e. together with an inhibitor/antagonist of TNF/TNFR that reduces TNF/TNFR signaling, wherein said inhibitor/antagonist of TNF/TNFR that reduces TNF/TNFR signaling (b) is administered to a patient in need thereof prior to administration of said antibody construct (a), wherein the patient is preferably a human being or a non-human primate, and wherein said inhibitor/antagonist is administered to prevent or reduce cytokine release syndrome (CRS) or other adverse effects associated with administration of a CD3-binding construct as disclosed throughout the present invention and as set out below:

(i) A combination product for the treatment of and optionally also for the prevention, prophylaxis or reduction of adverse events associated with immunotherapy, particularly cancer immunotherapy, wherein the cancer is selected from the group consisting of lung cancer, preferably SCLC, breast, cervical, colon, colorectal, endometrial, head and neck, liver, ovarian, pancreatic, prostate, skin, gastric, testis, thyroid, adrenal, renal, bladder, uterine, esophageal, urothelial and brain tumor or cancer, lymphoma, carcinoma, and sarcoma, and a metastatic cancer disease derived from any of the foregoing, with an antibody construct comprising at least one domain (also referred to as “first domain”) which binds to a target antigen on the surface of a target cell, and at least one other domain which binds to CD3, preferably human CD3, on the surface of a T cell according to any one of embodiments (i) to (xiv) of general Aspect A), comprising
[0173] (a) at least one antibody construct referred to in the preamble, and
[0174] (b) an inhibitor/antagonist of TNF/TNFR that reduces TNF/TNFR signaling,
   wherein said inhibitor/antagonist of TNF/TNFR that reduces TNF/TNFR signaling referred to in (b) is for administration to a patient prior to and optionally also following administration of said antibody construct referred to in (a), wherein the first domain binds selectively to human DLL3.
   (ii) The combination product for the treatment of and optionally also for the prevention or reduction of adverse events associated with immunotherapy, particularly cancer immunotherapy, wherein the cancer is selected from the group consisting of lung cancer, preferably SCLC, breast, cervical, colon, colorectal, endometrial, head and neck, liver, ovarian, pancreatic, prostate, skin, gastric, testis, thyroid, adrenal, renal, bladder, uterine, esophageal, urothelial and brain tumor or cancer, lymphoma, carcinoma, and sarcoma, and a metastatic cancer disease derived from any of the foregoing, with an antibody construct comprising at least one domain which binds to DLL3 on the surface of a target cell, and at least one other domain which binds to CD3, preferably human CD3, on the surface of a T cell according to embodiment (i) of Sub-Aspect A-5, comprising
[0175] (a) at least one antibody construct referred to in the preamble, and
[0176] (b) an inhibitor/antagonist of TNF/TNFR that reduces TNF/TNFR signaling,
   wherein said inhibitor/antagonist of TNF/TNFR that reduces TNF/TNFR signaling referred to in (b) is for administration to a patient prior to and optionally also following administration of said antibody construct referred to in (a), wherein said antibody construct binds to an epitope that is selectively bound by an antibody/antibody construct that comprises a VH region comprising CDR-H1, CDR-H2 and CDR-H3 and a VL region comprising CDR-L1, CDR-L2 and CDR-L3, which are selected from the group comprising: CDR-H1 as depicted in SEQ ID NO: 1040, CDR-H2 as depicted in SEQ ID NO: 1041, CDR-H3 as depicted in SEQ ID NO: 1042, CDR-L1 as depicted in SEQ ID NO: 1043, CDR-L2 as depicted in SEQ ID NO: 1044 and CDR-L3 as depicted in SEQ ID NO: 1045; CDR-H1 as depicted in SEQ ID NO: 1046, CDR-H2 as depicted in SEQ ID NO: 1047, CDR-H3 as depicted in SEQ ID NO: 1048, CDR-L1 as depicted in SEQ ID NO: 1049, CDR-L2 as depicted in SEQ ID NO: 1050 and CDR-L3 as depicted in SEQ ID NO: 1051; CDR-H1 as depicted in SEQ ID NO: 1052, CDR-H2 as depicted in SEQ ID NO: 1053, CDR-H3 as depicted in SEQ ID NO: 1054, CDR-L1 as depicted in SEQ ID NO: 1055, CDR-L2 as depicted in SEQ ID NO: 1056 and CDR-L3 as depicted in SEQ ID NO: 1057; CDR-H1 as depicted in SEQ ID NO: 1058, CDR-H2 as depicted in SEQ ID NO: 1059, CDR-H3 as depicted in SEQ ID NO: 1060, CDR-L1 as depicted in SEQ ID NO: 1061, CDR-L2 as depicted in SEQ ID NO: 1062 and CDR-L3 as depicted in SEQ ID NO: 1063; CDR-H1 as depicted in SEQ ID NO: 1064, CDR-H2 as depicted in SEQ ID NO: 1065, CDR-H3 as depicted in SEQ ID NO: 1066, CDR-L1 as depicted in SEQ ID NO: 1067, CDR-L2 as depicted in SEQ ID NO: 1068 and CDR-L3 as depicted in SEQ ID NO: 1069; CDR-H1 as depicted in SEQ ID NO: 1070, CDR-H2 as depicted in SEQ ID NO: 1071, CDR-H3 as depicted in SEQ ID NO: 1072, CDR-L1 as depicted in SEQ ID NO: 1073, CDR-L2 as depicted in SEQ ID NO: 1074 and CDR-L3 as depicted in SEQ ID NO: 1075; CDR-H1 as depicted in SEQ ID NO: 1076, CDR-H2 as depicted in SEQ ID NO: 1077, CDR-H3 as depicted in SEQ ID NO: 1078, CDR-L1 as depicted in SEQ ID NO: 1079, CDR-L2 as depicted in SEQ ID NO: 1080 and CDR-L3 as depicted in SEQ ID NO: 1081; CDR-H1 as depicted in SEQ ID NO: 1082, CDR-H2 as depicted in SEQ ID NO: 1083, CDR-H3 as depicted in SEQ ID NO: 1084, CDR-L1 as depicted in SEQ ID NO: 1085, CDR-L2 as depicted in SEQ ID NO: 1086 and CDR-L3 as depicted in SEQ ID NO: 1087; and CDR-H1 as depicted in SEQ ID NO: 1088, CDR-H2 as depicted in SEQ ID NO: 1089, CDR-H3 as depicted in SEQ ID NO: 1090, CDR-L1 as depicted in SEQ ID NO: 1091, CDR-L2 as depicted in SEQ ID NO: 1092 and CDR-L3 as depicted in SEQ ID NO: 1093.
   (iii) The combination product for the treatment of and optionally also for the prevention or reduction of adverse events associated with immunotherapy, particularly cancer immunotherapy, wherein the cancer is selected from the group consisting of lung cancer, preferably SCLC, breast, cervical, colon, colorectal, endometrial, head and neck, liver, ovarian, pancreatic, prostate, skin, gastric, testis, thyroid, adrenal, renal, bladder, uterine, esophageal, urothelial and brain tumor or cancer, lymphoma, carcinoma, and sarcoma, and a metastatic cancer disease derived from any of the foregoing, with an antibody construct comprising at least one domain which binds to DLL3 on the surface of a target cell, and at least one other domain which binds to CD3, preferably human CD3, on the surface of a T cell according to embodiments (i) and (ii) of Sub-Aspect A-5, comprising
[0177] (a) at least one antibody construct referred to in the preamble, and
[0178] (b) an inhibitor/antagonist of TNF/TNFR that reduces TNF/TNFR signaling,
   wherein said inhibitor/antagonist of TNF/TNFR that reduces TNF/TNFR signaling referred to in (b) is for administration to a patient prior to and optionally also following administration of said antibody construct referred to in (a), wherein the domain binds selectively to DLL3, and wherein said antibody construct binds to an epitope that is selectively bound by an antibody/antibody construct that comprises a binding domain comprising a VH region selected from the group comprising those depicted in SEQ ID NO: 1094, SEQ ID NO: 1095, SEQ ID NO: 1096, SEQ ID NO: 1097, SEQ ID NO: 1098, SEQ ID NO: 1099, SEQ ID NO: 1100, SEQ ID NO: 1101, SEQ ID NO: 1102, SEQ ID NO: 1103 and SEQ ID NO: 1104.
   (iv) The combination product for the treatment of and optionally also for the prevention or reduction of adverse events associated with immunotherapy, particularly cancer immunotherapy, wherein the cancer is selected from the group consisting of lung cancer, preferably SCLC, breast, cervical, colon, colorectal, endometrial, head and neck, liver, ovarian, pancreatic, prostate, skin, gastric, testis, thyroid, adrenal, renal, bladder, uterine, esophageal, urothelial and brain tumor or cancer, lymphoma, carcinoma, and sarcoma, and a metastatic cancer disease derived from any of the foregoing, with an antibody construct comprising at least one domain which binds to DLL3 on the surface of a target cell, and at least one other domain which binds to CD3, preferably human CD3, on the surface of a T cell according to embodiments (i) to (iii) of Sub-Aspect A-5, comprising
[0179] (a) at least one antibody construct referred to in the preamble, and
[0180] (b) an inhibitor/antagonist of TNF/TNFR that reduces TNF/TNFR signaling,
   wherein said inhibitor/antagonist of TNF/TNFR that reduces TNF/TNFR signaling referred to in (b) is for administration to a patient prior to and optionally also following administration of said antibody construct referred to in (a), wherein the domain binds selectively to DLL3, and wherein said antibody construct binds to an epitope that is selectively bound by an antibody/antibody construct that comprises a binding domain comprising a VL region selected from the group comprising those depicted in SEQ ID NO: 1105, SEQ ID NO: 1106, SEQ ID NO: 1107, SEQ ID NO: 1108, SEQ ID NO: 1109, SEQ ID NO: 1110, SEQ ID NO: 1111, SEQ ID NO: 1112, SEQ ID NO: 1113, SEQ ID NO: 1114 and SEQ ID NO: 1115.
   (v) The combination product for the treatment of and optionally also for the prevention or reduction of adverse events associated with immunotherapy, particularly cancer immunotherapy, wherein the cancer is selected from the group consisting of lung cancer, preferably SCLC, breast, cervical, colon, colorectal, endometrial, head and neck, liver, ovarian, pancreatic, prostate, skin, gastric, testis, thyroid, adrenal, renal, bladder, uterine, esophageal, urothelial and brain tumor or cancer, lymphoma, carcinoma, and sarcoma, and a metastatic cancer disease derived from any of the foregoing, with an antibody construct comprising at least one domain which binds to DLL3 on the surface of a target cell, and at least one other domain which binds to CD3, preferably human CD3, on the surface of a T cell according to embodiments (i) to (iv) of Sub-Aspect A-5, comprising
[0181] (a) at least one antibody construct referred to in the preamble, and
[0182] (b) an inhibitor/antagonist of TNF/TNFR that reduces TNF/TNFR signaling,
   wherein said inhibitor/antagonist of TNF/TNFR that reduces TNF/TNFR signaling referred to in (b) is for administration to a patient prior to and optionally also following administration of said antibody construct referred to in (a), wherein the domain binds selectively to DLL3, and wherein said antibody construct binds to an epitope that is selectively bound by an antibody/antibody construct that comprises a binding domain comprising a pair of a VH region and a VL region selected from the group consisting of pairs of a VH region and a VL region as depicted in SEQ ID NOs: 1094+1105; SEQ ID NOs: 1095+1106; SEQ ID NOs: 1096+1107; SEQ ID NOs: 1097+1108; SEQ ID NOs: 1098+1109; SEQ ID NOs: 1099+1110; SEQ ID NOs: 1100+1111; SEQ ID NOs: 1101+1112; SEQ ID NOs: 1102+1113; SEQ ID NOs: 1103+1114; and SEQ ID NOs: 1104+1115.
   (vi) The combination product for the treatment of and optionally also for the prevention or reduction of adverse events associated with immunotherapy, particularly cancer immunotherapy, wherein the cancer is selected from the group consisting of lung cancer, preferably SCLC, breast, cervical, colon, colorectal, endometrial, head and neck, liver, ovarian, pancreatic, prostate, skin, gastric, testis, thyroid, adrenal, renal, bladder, uterine, esophageal, urothelial and brain tumor or cancer, lymphoma, carcinoma, and sarcoma, and a metastatic cancer disease derived from any of the foregoing, with an antibody construct comprising at least one domain which binds to DLL3 on the surface of a target cell, and at least one other domain which binds to CD3, preferably human CD3, on the surface of a T cell according to embodiments (i) to (v) of Sub-Aspect A-5, comprising
[0183] (a) at least one antibody construct referred to in the preamble, and
[0184] (b) an inhibitor/antagonist of TNF/TNFR that reduces TNF/TNFR signaling,
   wherein said inhibitor/antagonist of TNF/TNFR that reduces TNF/TNFR signaling referred to in (b) is for administration to a patient prior to and optionally also following administration of said antibody construct referred to in (a), particularly wherein the patient is not a rodent, and more particularly, wherein the patient is either a human being or a non-human primate, and wherein said antibody construct binds to an epitope that is selectively bound by an antibody/antibody construct that comprises a binding domain comprising a polypeptide selected from the group consisting of those depicted in SEQ ID NO: 1116, SEQ ID NO: 1117, SEQ ID NO: 1118, SEQ ID NO: 1119, SEQ ID NO: 1120, SEQ ID NO: 1121, SEQ ID NO: 1122, SEQ ID NO: 1123, SEQ ID NO: 1124, SEQ ID NO: 1125 and SEQ ID NO: 1126.
   (vii) The combination product for the treatment of and optionally also for the prevention or reduction of adverse events associated with immunotherapy, particularly cancer immunotherapy, wherein the cancer is selected from the group consisting of lung cancer, preferably SCLC, breast, cervical, colon, colorectal, endometrial, head and neck, liver, ovarian, pancreatic, prostate, skin, gastric, testis, thyroid, adrenal, renal, bladder, uterine, esophageal, urothelial and brain tumor or cancer, lymphoma, carcinoma, and sarcoma, and a metastatic cancer disease derived from any of the foregoing, with an antibody construct comprising at least one domain which binds to DLL3 on the surface of a target cell, and at least one other domain which binds to CD3, preferably human CD3, on the surface of a T cell according to embodiments (i) to (vi) of Sub-Aspect A-5, comprising
[0185] (a) at least one antibody construct referred to in the preamble, and
[0186] (b) an inhibitor/antagonist of TNF/TNFR that reduces TNF/TNFR signaling,
   wherein said inhibitor/antagonist of TNF/TNFR that reduces TNF/TNFR signaling referred to in (b) is for administration to a patient prior to and optionally also following administration of said antibody construct referred to in (a), wherein said antibody construct binds to an epitope that is selectively bound by an antibody/antibody construct that comprises a binding domain comprising a polypeptide selected from the group consisting of those depicted in SEQ ID NO: 1127, SEQ ID NO: 1128, SEQ ID NO: 1129, SEQ ID NO: 1130, SEQ ID NO: 1131, SEQ ID NO: 1132, SEQ ID NO: 1133, SEQ ID NO: 1134, SEQ ID NO: 1135, SEQ ID NO: 1136, SEQ ID NO: 1137, SEQ ID NO: 1139, SEQ ID NO: 1140, SEQ ID NO: 1141, SEQ ID NO: 1142, SEQ ID NO: 1143, and SEQ ID NO: 1144.
   (viii) The combination product for the treatment of and optionally also for the prevention or reduction of adverse events associated with immunotherapy, particularly cancer immunotherapy, wherein the cancer is selected from the group consisting of lung cancer, preferably SCLC, breast, cervical, colon, colorectal, endometrial, head and neck, liver, ovarian, pancreatic, prostate, skin, gastric, testis, thyroid, adrenal, renal, bladder, uterine, esophageal, urothelial and brain tumor or cancer, lymphoma, carcinoma, and sarcoma, and a metastatic cancer disease derived from any of the foregoing, with an antibody construct comprising at least one domain which binds to DLL3 on the surface of a target cell, and at least one other domain which binds to CD3, preferably human CD3, on the surface of a T cell according to embodiments (i) to (vii) of Sub-Aspect A-5, comprising
[0187] (a) at least one antibody construct referred to in the preamble, and
[0188] (b) an inhibitor/antagonist of TNF/TNFR that reduces TNF/TNFR signaling,
   wherein said inhibitor/antagonist of TNF/TNFR that reduces TNF/TNFR signaling referred to in (b) is for administration to a patient prior to and optionally also following administration of said antibody construct referred to in (a), wherein said antibody construct binds to an epitope that is selectively bound by an antibody/antibody construct that comprises a binding domain comprising a polypeptide binding domain that binds to an epitope of DLL3 which is comprised within the region as depicted in SEQ ID NO: 1145.
   (ix) The combination product for the treatment of and optionally also for the prevention or reduction of adverse events associated with immunotherapy, particularly cancer immunotherapy, wherein the cancer is selected from the group consisting of lung cancer, preferably SCLC, breast, cervical, colon, colorectal, endometrial, head and neck, liver, ovarian, pancreatic, prostate, skin, gastric, testis, thyroid, adrenal, renal, bladder, uterine, esophageal, urothelial and brain tumor or cancer, lymphoma, carcinoma, and sarcoma, and a metastatic cancer disease derived from any of the foregoing, with an antibody construct comprising at least one domain which binds to DLL3 on the surface of a target cell, and at least one other domain which binds to CD3, preferably human CD3, on the surface of a T cell according to embodiments (i) to (viii) of Sub-Aspect A-5, comprising
[0189] (a) at least one antibody construct referred to in the preamble, and
[0190] (b) an inhibitor/antagonist of TNF/TNFR that reduces TNF/TNFR signaling,
   wherein said inhibitor/antagonist of TNF/TNFR that reduces TNF/TNFR signaling referred to in (b) is for administration to a patient prior to and optionally also following administration of said antibody construct referred to in (a), wherein said antibody construct binds to an epitope that is selectively bound by an antibody/antibody construct that comprises a binding domain comprising a polypeptide binding domain that comprises a VH region comprising CDR-H1, CDR-H2 and CDR-H3 and a VL region comprising CDR-L1, CDR-L2 and CDR-L3 selected from the group consisting of: CDR-H1 as depicted in SEQ ID NO: 1146, CDR-H2 as depicted in SEQ ID NO: 1147, CDR-H3 as depicted in SEQ ID NO: 1148, CDR-L1 as depicted in SEQ ID NO: 1149, CDR-L2 as depicted in SEQ ID NO: 1150 and CDR-L3 as depicted in SEQ ID NO: 1151; CDR-H1 as depicted in SEQ ID NO: 1152, CDR-H2 as depicted in SEQ ID NO: 1153, CDR-H3 as depicted in SEQ ID NO: 1154, CDR-L1 as depicted in SEQ ID NO: 1155, CDR-L2 as depicted in SEQ ID NO: 1156 and CDR-L3 as depicted in SEQ ID NO: 1157; CDR-H1 as depicted in SEQ ID NO: 1158, CDR-H2 as depicted in SEQ ID NO: 1159, CDR-H3 as depicted in SEQ ID NO: 1160, CDR-L1 as depicted in SEQ ID NO: 1161, CDR-L2 as depicted in SEQ ID NO: 1162 and CDR-L3 as depicted in SEQ ID NO: 1163; CDR-H1 as depicted in SEQ ID NO: 1164, CDR-H2 as depicted in SEQ ID NO: 1165, CDR-H3 as depicted in SEQ ID NO: 1166, CDR-L1 as depicted in SEQ ID NO: 1167, CDR-L2 as depicted in SEQ ID NO: 1168 and CDR-L3 as depicted in SEQ ID NO: 1169; CDR-H1 as depicted in SEQ ID NO: 1170, CDR-H2 as depicted in SEQ ID NO: 1171, CDR-H3 as depicted in SEQ ID NO: 1172, CDR-L1 as depicted in SEQ ID NO: 1173, CDR-L2 as depicted in SEQ ID NO: 1174 and CDR-L3 as depicted in SEQ ID NO: 1175; CDR-H1 as depicted in SEQ ID NO: 1152, CDR-H2 as depicted in SEQ ID NO: 1176, CDR-H3 as depicted in SEQ ID NO: 1154, CDR-L1 as depicted in SEQ ID NO: 1155, CDR-L2 as depicted in SEQ ID NO: 1156 and CDR-L3 as depicted in SEQ ID NO: 1157; CDR-H1 as depicted in SEQ ID NO: 1152, CDR-H2 as depicted in SEQ ID NO: 1177, CDR-H3 as depicted in SEQ ID NO: 1154, CDR-L1 as depicted in SEQ ID NO: 1155, CDR-L2 as depicted in SEQ ID NO: 1156 and CDR-L3 as depicted in SEQ ID NO: 1157; CDR-H1 as depicted in SEQ ID NO: 1152, CDR-H2 as depicted in SEQ ID NO: 1153, CDR-H3 as depicted in SEQ ID NO: 1154, CDR-L1 as depicted in SEQ ID NO: 1178, CDR-L2 as depicted in SEQ ID NO: 1156 and CDR-L3 as depicted in SEQ ID NO: 1157; CDR-H1 as depicted in SEQ ID NO: 1152, CDR-H2 as depicted in SEQ ID NO: 1153, CDR-H3 as depicted in SEQ ID NO: 1154, CDR-L1 as depicted in SEQ ID NO: 1179, CDR-L2 as depicted in SEQ ID NO: 1156 and CDR-L3 as depicted in SEQ ID NO: 1157; CDR-H1 as depicted in SEQ ID NO: 1152, CDR-H2 as depicted in SEQ ID NO: 1153, CDR-H3 as depicted in SEQ ID NO: 1154, CDR-L1 as depicted in SEQ ID NO: 1180, CDR-L2 as depicted in SEQ ID NO: 1156 and CDR-L3 as depicted in SEQ ID NO: 1157; CDR-H1 as depicted in SEQ ID NO: 1152, CDR-H2 as depicted in SEQ ID NO: 1153, CDR-H3 as depicted in SEQ ID NO: 1154, CDR-L1 as depicted in SEQ ID NO: 1181, CDR-L2 as depicted in SEQ ID NO: 1156 and CDR-L3 as depicted in SEQ ID NO: 1157; CDR-H1 as depicted in SEQ ID NO: 1152, CDR-H2 as depicted in SEQ ID NO: 1176, CDR-H3 as depicted in SEQ ID NO: 1154, CDR-L1 as depicted in SEQ ID NO: 1178, CDR-L2 as depicted in SEQ ID NO: 1156 and CDR-L3 as depicted in SEQ ID NO: 1157; and CDR-H1 as depicted in SEQ ID NO: 1152, CDR-H2 as depicted in SEQ ID NO: 1177, CDR-H3 as depicted in SEQ ID NO: 1154, CDR-L1 as depicted in SEQ ID NO: 1179, CDR-L2 as depicted in SEQ ID NO: 1156 and CDR-L3 as depicted in SEQ ID NO: 1157.
   (x) The combination product for the treatment of and optionally also for the prevention or reduction of adverse events associated with immunotherapy, particularly cancer immunotherapy, wherein the cancer is selected from the group consisting of lung cancer, preferably SCLC, breast, cervical, colon, colorectal, endometrial, head and neck, liver, ovarian, pancreatic, prostate, skin, gastric, testis, thyroid, adrenal, renal, bladder, uterine, esophageal, urothelial and brain tumor or cancer, lymphoma, carcinoma, and sarcoma, and a metastatic cancer disease derived from any of the foregoing, with an antibody construct comprising at least one domain which binds to DLL3 on the surface of a target cell, and at least one other domain which binds to CD3, preferably human CD3, on the surface of a T cell according to embodiments (i) to (ix) of Sub-Aspect A-5, comprising
[0191] (a) at least one antibody construct referred to in the preamble, and
[0192] (b) an inhibitor/antagonist of TNF/TNFR that reduces TNF/TNFR signaling,
   wherein said inhibitor/antagonist of TNF/TNFR that reduces TNF/TNFR signaling referred to in (b) is for administration to a patient prior to and optionally also following administration of said antibody construct referred to in (a), wherein said antibody construct binds to an epitope that is selectively bound by an antibody/antibody construct comprising a polypeptide a binding domain that comprises a VH region selected from the group consisting of those depicted in SEQ ID NO: 1182, SEQ ID NO: 1183, SEQ ID NO: 1184, SEQ ID NO: 1185, SEQ ID NO: 1186, SEQ ID NO: 1187, SEQ ID NO: 1188, SEQ ID NO: 1189, SEQ ID NO: 1190, SEQ ID NO: 1191, SEQ ID NO: 1192, SEQ ID NO: 1193, SEQ ID NO: 1194, SEQ ID NO: 1195, SEQ ID NO: 1196, and SEQ ID NO: 1197.
   (xi) The combination product for the treatment of and optionally also for the prevention or reduction of adverse events associated with immunotherapy, particularly cancer immunotherapy, wherein the cancer is selected from the group consisting of lung cancer, preferably SCLC, breast, cervical, colon, colorectal, endometrial, head and neck, liver, ovarian, pancreatic, prostate, skin, gastric, testis, thyroid, adrenal, renal, bladder, uterine, esophageal, urothelial and brain tumor or cancer, lymphoma, carcinoma, and sarcoma, and a metastatic cancer disease derived from any of the foregoing, with an antibody construct comprising at least one domain which binds to DLL3 on the surface of a target cell, and at least one other domain which binds to CD3, preferably human CD3, on the surface of a T cell according to embodiments (i) to (v) of Sub-Aspect A-5, comprising
[0193] (a) at least one antibody construct referred to in the preamble, and
[0194] (b) an inhibitor/antagonist of TNF/TNFR that reduces TNF/TNFR signaling,
   wherein said inhibitor/antagonist of TNF/TNFR that reduces TNF/TNFR signaling referred to in (b) is for administration to a patient prior to and optionally also following administration of said antibody construct referred to in (a), wherein said antibody construct binds to an epitope that is selectively bound by an antibody/antibody construct comprising a polypeptide have a binding domain that comprises a VL region selected from the group consisting of those depicted in SEQ ID NO: 1198, SEQ ID NO: 1199, SEQ ID NO: 1200, SEQ ID NO: 1201, SEQ ID NO: 1202, SEQ ID NO: 1203, SEQ ID NO: 1204, SEQ ID NO: 1205, SEQ ID NO: 1206, SEQ ID NO: 1207, SEQ ID NO: 1208, SEQ ID NO: 1209, SEQ ID NO: 1210, SEQ ID NO: 1211, SEQ ID NO: 1212, SEQ ID NO: 1213, SEQ ID NO: 1214, SEQ ID NO: 1215, SEQ ID NO: 1216, and SEQ ID NO: 1217.
   (xii) The combination product for the treatment of and optionally also for the prevention or reduction of adverse events associated with immunotherapy, particularly cancer immunotherapy, wherein the cancer is selected from the group consisting of lung cancer, preferably SCLC, breast, cervical, colon, colorectal, endometrial, head and neck, liver, ovarian, pancreatic, prostate, skin, gastric, testis, thyroid, adrenal, renal, bladder, uterine, esophageal, urothelial and brain tumor or cancer, lymphoma, carcinoma, and sarcoma, and a metastatic cancer disease derived from any of the foregoing, with an antibody construct comprising at least one domain which binds to DLL3 on the surface of a target cell, and at least one other domain which binds to CD3, preferably human CD3, on the surface of a T cell according to embodiments (i) to (xi) of Sub-Aspect A-5, comprising
[0195] (a) at least one antibody construct referred to in the preamble, and
[0196] (b) an inhibitor/antagonist of TNF/TNFR that reduces TNF/TNFR signaling,
   wherein said inhibitor/antagonist of TNF/TNFR that reduces TNF/TNFR signaling referred to in (b) is for administration to a patient prior to and optionally also following administration of said antibody construct referred to in (a), particularly wherein the patient is not a rodent, and more particularly, wherein said antibody construct binds to an epitope that is selectively bound by an antibody/antibody construct comprising a polypeptide that comprises a VH region and a VL region selected from the group consisting of pairs of a VH region and a VL region as depicted in SEQ ID NOs: 1182+1198; SEQ ID NOs: 1183+1199; SEQ ID NOs: 1184+1200; SEQ ID NOs: 1185+1201; SEQ ID NOs: 1186+1202; SEQ ID NOs 1183+1203; SEQ ID NOs 1183+1204; SEQ ID NOs 1183+1206; SEQ ID NOs 1183+1206; SEQ ID NOs 1183+1207; SEQ ID NOs 1187+1199; SEQ ID NOs 1188+1199; SEQ ID NOs 1189+1199; SEQ ID NOs 1187+1207; SEQ ID NOs 1190+1208; 1191+1209; SEQ ID NOs 1191+1209; SEQ ID NOs 1192+1210; SEQ ID NOs 1192+1211; SEQ ID NOs 1192+1212; SEQ ID NOs 1192+1213; SEQ ID NOs 1192+1214; SEQ ID NOs 1192+1215; SEQ ID NOs 1193+1210; SEQ ID NOs 1194+1210; SEQ ID NOs 1195+1210; SEQ ID NOs 1193+1215; SEQ ID NOs 1196+1216; and SEQ ID NOs 1197+1217.
   (xiii) The combination product for the treatment of and optionally also for the prevention or reduction of adverse events associated with immunotherapy, particularly cancer immunotherapy, wherein the cancer is selected from the group consisting of lung cancer, preferably SCLC, breast, cervical, colon, colorectal, endometrial, head and neck, liver, ovarian, pancreatic, prostate, skin, gastric, testis, thyroid, adrenal, renal, bladder, uterine, esophageal, urothelial and brain tumor or cancer, lymphoma, carcinoma, and sarcoma, and a metastatic cancer disease derived from any of the foregoing, with an antibody construct comprising at least one domain which binds to DLL3 on the surface of a target cell, and at least one other domain which binds to CD3, preferably human CD3, on the surface of a T cell according to embodiments (i) to (xii) of Sub-Aspect A-5, comprising
[0197] (a) at least one antibody construct referred to in the preamble, and
[0198] (b) an inhibitor/antagonist of TNF/TNFR that reduces TNF/TNFR signaling,
   wherein said inhibitor/antagonist of TNF/TNFR that reduces TNF/TNFR signaling referred to in (b) is for administration to a patient prior to and optionally also following administration of said antibody construct referred to in (a), particularly wherein the patient is not a rodent, and more particularly, wherein said antibody construct binds to an epitope that is selectively bound by an antibody/antibody construct that comprises a binding domain comprising a polypeptide selected from the group consisting of those depicted in SEQ ID NO: 1218, SEQ ID NO: 1219, SEQ ID NO: 1220, SEQ ID NO: 1221, SEQ ID NO: 1222, SEQ ID NO: 1223, SEQ ID NO: 1224, SEQ ID NO: 1225, SEQ ID NO: 1226, SEQ ID NO: 1227, SEQ ID NO: 1228, SEQ ID NO: 1229, SEQ ID NO: 1230, SEQ ID NO: 1231, SEQ ID NO: 1232, SEQ ID NO: 1233, SEQ ID NO: 1234, SEQ ID NO: 1235, SEQ ID NO: 1236, SEQ ID NO: 1237, SEQ ID NO: 1238, SEQ ID NO: 1239, SEQ ID NO: 1240, SEQ ID NO: 1241, SEQ ID NO: 1242, SEQ ID NO: 1243, SEQ ID NO: 1244, and SEQ ID NO: 1245.
   (xiv) The combination product for the treatment of and optionally also for the prevention or reduction of adverse events associated with immunotherapy, particularly cancer immunotherapy, wherein the cancer is selected from the group consisting of lung cancer, preferably SCLC, breast, cervical, colon, colorectal, endometrial, head and neck, liver, ovarian, pancreatic, prostate, skin, gastric, testis, thyroid, adrenal, renal, bladder, uterine, esophageal, urothelial and brain tumor or cancer, lymphoma, carcinoma, and sarcoma, and a metastatic cancer disease derived from any of the foregoing, with an antibody construct comprising at least one domain which binds to DLL3 on the surface of a target cell, and at least one other domain which binds to CD3, preferably human CD3, on the surface of a T cell according to embodiments (i) to (xiii) of Sub-Aspect A-5, comprising
[0199] (a) at least one antibody construct referred to in the preamble, and
[0200] (b) an inhibitor/antagonist of TNF/TNFR that reduces TNF/TNFR signaling,
   wherein said inhibitor/antagonist of TNF/TNFR that reduces TNF/TNFR signaling referred to in (b) is for administration to a patient prior to and optionally also following administration of said antibody construct referred to in (a), particularly wherein the patient is not a rodent, and more particularly, wherein said antibody construct binds to an epitope that is selectively bound by an antibody/antibody construct comprising a polypeptide selected from the group consisting of those depicted in SEQ ID NO: 1246, SEQ ID NO: 1247, SEQ ID NO: 1248, SEQ ID NO: 1249, SEQ ID NO: 1250; SEQ ID NO: 1251, SEQ ID NO: 1252, SEQ ID NO: 1253, SEQ ID NO: 1254, SEQ ID NO: 1255, SEQ ID NO: 1256, SEQ ID NO: 1257, SEQ ID NO: 1258, SEQ ID NO: 1259, SEQ ID NO: 1260, SEQ ID NO: 1261, SEQ ID NO: 1262, SEQ ID NO: 1263, SEQ ID NO: 1264, SEQ ID NO: 1265, SEQ ID NO: 1266, SEQ ID NO: 1267, SEQ ID NO: 1268, SEQ ID NO: 1269, SEQ ID NO: 1270, SEQ ID NO: 1271, SEQ ID NO: 1272, SEQ ID NO: 1273, SEQ ID NO: 1274, SEQ ID NO: 1275, and SEQ ID NO: 1276.
   (xv) The combination product for the treatment of and optionally also for the prevention or reduction of adverse events associated with immunotherapy, particularly cancer immunotherapy, wherein the cancer is selected from the group consisting of lung cancer, preferably SCLC, breast, cervical, colon, colorectal, endometrial, head and neck, liver, ovarian, pancreatic, prostate, skin, gastric, testis, thyroid, adrenal, renal, bladder, uterine, esophageal, urothelial and brain tumor or cancer, lymphoma, carcinoma, and sarcoma, and a metastatic cancer disease derived from any of the foregoing, with an antibody construct comprising at least one domain which binds to DLL3 on the surface of a target cell, and at least one other domain which binds to CD3, preferably human CD3, on the surface of a T cell according to embodiments (i) to (xiv) of Sub-Aspect A-5, comprising
[0201] (a) at least one antibody construct referred to in the preamble, and
[0202] (b) an inhibitor/antagonist of TNF/TNFR that reduces TNF/TNFR signaling,
   wherein said inhibitor/antagonist of TNF/TNFR that reduces TNF/TNFR signaling referred to in (b) is for administration to a patient prior to and optionally also following administration of said antibody construct referred to in (a), particularly wherein the patient is not a rodent, and more particularly, wherein said antibody construct binds to an epitope that is selectively bound by an antibody/antibody construct that comprises a binding domain comprising binding domain comprising or consisting of a polypeptide selected from the group consisting of those depicted in SEQ ID NO: 1277, SEQ ID NO: 1278, SEQ ID NO: 1279, SEQ ID NO: 1280, SEQ ID NO: 1281, SEQ ID NO: 1282, SEQ ID NO: 1283, SEQ ID NO: 1284.
   Aspect B)—Methods of Treatment, Prevention and/or Prophylaxis

[0203] The present invention further relates to the treatment, and optionally also to the prevention, prophylaxis, amelioration, or reduction of adverse events associated with immunotherapy, preferably immunotherapy of a neoplastic disease, with an antibody construct comprising a first domain which binds to a target antigen on the surface of a target cell, and a second domain which binds to CD3, preferably human CD3, on the surface of a T cell, comprising administering a combination product of any one of the preceding embodiments of general Aspect A) to a patient in need thereof as discussed in the following embodiments:

(i) A method of for the treatment of and optionally also for the prevention, prophylaxis, amelioration, or reduction of adverse events associated with immunotherapy, preferably immunotherapy of a neoplastic disease, with an antibody construct comprising a first domain which binds to a target antigen on the surface of a target cell, and a second domain which binds to CD3, preferably human CD3, on the surface of a T cell, comprising administering a combination product of any one of the preceding embodiments of general Aspect A) to a patient in need thereof, wherein said target antigen is a tumor-associated antigen selected from the group comprising CD19, CD33, FLT3, PSMA, and DLL3.
(ii) The method for the treatment of and optionally also for the prevention, prophylaxis, amelioration, or reduction of adverse events associated with immunotherapy with an antibody construct comprising a first domain which binds to a target antigen on the surface of a target cell, and a second domain which binds to CD3, preferably human CD3, on the surface of a T cell according to embodiment (i) of Aspect B).
(iii) The method for the treatment of and optionally also for the prevention, prophylaxis, amelioration, or reduction of adverse events associated with immunotherapy with an antibody construct comprising a first domain which binds to a target antigen on the surface of a target cell, and a second domain which binds to CD3, preferably human CD3, on the surface of a T cell according to embodiment (i) and/or (ii) of Aspect B) comprising:
[0204] (a) administering an antibody construct comprising a first domain which binds to a target antigen on the surface of a target cell, and a second domain which binds to CD3, preferably human CD3, on the surface of a T cell,
[0205] (b) administering an inhibitor/antagonist of TNF/TNFR that reduces TNF/TNFR signaling,
   wherein said inhibitor/antagonist of TNF/TNFR that reduces TNF/TNFR signaling is administered to the patient prior to and optionally also following administration of said antibody construct.
   (iv) The method for the prevention, prophylaxis, amelioration, or reduction of adverse events associated with immunotherapy with an antibody construct comprising a first domain which binds to a target antigen on the surface of a target cell, and a second domain which binds to CD3, preferably human CD3, on the surface of a T cell according to any one of embodiments (i) to (iii) of Aspect B), wherein the adverse event associated with immunotherapy is CRS or TLS. Adverse events include, but are not limited to a neurological reaction, preferably one or more selected from the group consisting of: confusion, ataxia, disorientation, dysphasia, aphasia, speech impairment, cerebellar symptoms, treor, apraxia, seizure, grand mal convulsion, palsy, and balance disorder.
   (v) The method for the treatment of and optionally also for the prevention, prophylaxis, amelioration, or reduction of adverse events associated with immunotherapy with an antibody construct comprising a first domain which binds to a target antigen on the surface of a target cell, and a second domain which binds to CD3, preferably human CD3, on the surface of a T cell according to embodiments (i) to (iv) of Aspect B), wherein the second domain of said antibody construct binds to CD3, preferably human CD3, epsilon and to Callithrix jacchus or Saimiri sciureus CD3 epsilon.
   (vi) The method for the treatment of and optionally also for the prevention, prophylaxis, amelioration, or reduction of adverse events associated with immunotherapy with an antibody construct comprising a first domain which binds to a target antigen on the surface of a target cell, and a second domain which binds to CD3, preferably human CD3, on the surface of a T cell according to embodiments (i) to (v) of Aspect B), wherein
[0206] (a)—the antibody construct is a single chain antibody construct,
[0207] (b)—the first domain is in the format of an scFv,
[0208] (c)—the second domain is in the format of an scFv,
[0209] (d)—the first and the second domain are connected via a linker, and/or
[0210] (e)—the antibody construct comprises a domain providing an extended serum half-life.
   (vii) The method for the treatment of and optionally also for the prevention, prophylaxis, amelioration, or reduction of adverse events associated with immunotherapy with an antibody construct comprising a first domain which binds to a target antigen on the surface of a target cell, and a second domain which binds to CD3, preferably human CD3, on the surface of a T cell according to embodiments (i) to (vi) of Aspect B), wherein the first domain binds to a target antigen selected from the group comprising tumor-associated antigens, viral antigens, bacterial antigens, peptide-MHC complexes presenting a peptide fragments derived from a tumor-associated antigen, viral antigen, bacterial antigen, or a disease-associated antigen.
   (viii) The method for the treatment of and optionally also for the prevention, prophylaxis, amelioration, or reduction of adverse events associated with immunotherapy with an antibody construct comprising a first domain which binds to a target antigen on the surface of a target cell, and a second domain which binds to CD3, preferably human CD3, on the surface of a T cell according to embodiments (i) to (vii) of Aspect B), wherein the antagonist of TNF/TNFR that reduces TNF/TNFR signaling is selected from the group comprising small molecules, biological molecules, aptamers, antibodies and derivatives thereof.
   (ix) The method for the treatment of and optionally also for the prevention, prophylaxis, amelioration, or reduction of adverse events associated with immunotherapy with an antibody construct comprising a first domain which binds to a target antigen on the surface of a target cell, and a second domain which binds to CD3, preferably human CD3, on the surface of a T cell according to embodiments (i) to (viii) of Aspect B), wherein the inhibitor/antagonist of TNF/TNFR that reduces TNF/TNFR signaling is selected from the group of TNF inhibitors/antagonists comprising etanercept, infliximab, adalimumab, certolizumab Pergol, and golimumab, particularly etanercept.
   (x) The method for the treatment of and optionally also for the prevention, prophylaxis, amelioration, or reduction of adverse events associated with immunotherapy with an antibody construct comprising a first domain which binds to a target antigen on the surface of a target cell, and a second domain which binds to CD3, preferably human CD3, on the surface of a T cell according to embodiments (i) to (ix) of Aspect B), wherein said combination product is for administration to a patient at risk of developing adverse events or having an intolerance to one of a group comprising corticosteroids, IL-6-inhibitors, IL-6R-inhibitors, and/or inhibitor/antagonist of TNF/TNFR that are different from the group of inhibitors/antagonists of TNF/TNFR according to (b) in any on of the preceding embodiments, particularly different from etanercept.
   (xi) The method for the treatment of and optionally also for the prevention, prophylaxis, amelioration, or reduction of adverse events associated with immunotherapy with an antibody construct comprising a first domain which binds to a target antigen on the surface of a target cell, and a second domain which binds to CD3, preferably human CD3, on the surface of a T cell according to embodiments (i) to (x) of Aspect B), wherein said antibody construct is for administration to a patient at risk of developing adverse events or having an intolerance to corticosteroids, wherein the corticosteroid is dexamethasone.
   (xii) The method for the treatment of and optionally also for the prevention, prophylaxis, amelioration, or reduction of adverse events associated with immunotherapy with an antibody construct comprising a first domain which binds to a target antigen on the surface of a target cell, and a second domain which binds to CD3, preferably human CD3, on the surface of a T cell according to embodiments (i) to (xi) of Aspect B), preferably in the immunotherapy of a neoplastic disease, wherein said antibody construct is for administration to a patient at risk of developing adverse events or having an intolerance to IL6-antagonists and/or IL-6R-antagonists, particularly wherein the IL-6R-antagonist is tocilizumab.
   (xiii) The method for the treatment of and optionally also for the prevention, prophylaxis, amelioration, or reduction of adverse events associated with immunotherapy with an antibody construct comprising a first domain which binds to a target antigen on the surface of a target cell, and a second domain which binds to CD3, preferably human CD3, on the surface of a T cell according to embodiments (i) to (xii) of Aspect B), preferably immunotherapy of a neoplastic disease, wherein said antibody construct further comprises at least one corticosteroid.
   (xiv) The method for the treatment of and optionally also for the prevention, prophylaxis, amelioration, or reduction of adverse events associated with immunotherapy with an antibody construct comprising a first domain which binds to a target antigen on the surface of a target cell, and a second domain which binds to CD3, preferably human CD3, on the surface of a T cell according to embodiments (i) to (xiii) of Aspect B), preferably in the immunotherapy of a neoplastic disease, wherein said corticostoid is dexamethasone.
   (xv) The method for the treatment of and optionally also for the prevention, prophylaxis, amelioration, or reduction of adverse events associated with immunotherapy with an antibody construct comprising a first domain which binds to a target antigen on the surface of a target cell, and a second domain which binds to CD3, preferably human CD3, on the surface of a T cell according to embodiments (i) to (xiv), of Aspect B), preferably in the immunotherapy of a neoplastic disease, wherein said combination product further comprises at least one IL-6 antagonist and/or IL-6R-antagonist, wherein said IL-6R-antagonist is tocilizumab.
   (xvi) The method for the treatment of and optionally also for the prevention, prophylaxis, amelioration, or reduction of adverse events associated with immunotherapy with an antibody construct comprising a first domain which binds to a target antigen on the surface of a target cell, and a second domain which binds to CD3, preferably human CD3, on the surface of a T cell according to embodiments (i) to (xv) of Aspect B), preferably in the immunotherapy of a neoplastic disease, further comprising at least one corticosteroid, particularly dexamethasone and/or at least one IL-6 and/or IL-6R-antagonist, particularly tocilizumab, wherein said at least one corticosteroid and/or said IL-6 and/or IL-6R-antagonist is for administration to a patient in need thereof prior of, concomitant to, and/or after administration of said antibody construct (a).

[0211] The combination products used in the methods for the prevention, prophylaxis, amelioration, or reduction according of adverse events according to any one of the above embodiments involves combination products comprising antibody constructs as disclosed in the following sections in Sub-Aspects B-1 to B-5.

### Sub-Aspect B-1—Immunotherapeutic Methods for the Treatment of Cancer and Prevention, Prophylaxis of Immunotherapy-Related Adverse Events Using Constructs Binding CD19

[0212] As discussed above, one target antigen on the surface of a target cell that is bound by the first domain of the antibody constructs, which are part of combination products, kits, etc., and may be used or administered in methods according to the invention, is CD19. According to the invention, antibody contracts that comprise a CD19-binding domain are disclosed, for example, in WO2010052014, which is hereby incorporated by reference in its entirety. Some of the therein disclosed antibody constructs and domains binding, inter alia, to CD19 are also shown in the Sequence Listing below.

[0213] Accordingly, methods for the treatment of cancer and additionally for the prevention, prophylaxis, amelioration, or reduction of adverse events associated with immunotherapy with an antibody are envisaged, wherein the domain of the antibody construct used in accordance with the present invention, which binds to CD19 comprises a VL region comprising CDR-L1, CDR-L2 and CDR-L3, wherein CDR-L1 is depicted in SEQ ID NO:314, CDR-L2 is depicted in SEQ ID NO: 315, and CDR-L3 is depicted in SEQ ID NO: 316.

[0214] Also, methods for the treatment of cancer and additionally for the prevention, prophylaxis, amelioration, or reduction of adverse events associated with immunotherapy with an antibody are envisaged, wherein the domain which binds to CD19 comprises a VH region comprising CDR-H1, CDR-H2 and CDR-H3 selected from: CDR-H1 as depicted in SEQ ID NO: 310, CDR-H2 as depicted in SEQ ID NO: 312, and CDR-H3 as depicted in SEQ ID NO: 313; CDR-H1 as depicted in SEQ ID NO: 311, CDR-H2 as depicted in SEQ ID NO: 312, and CDR-H3 as depicted in SEQ ID NO: 313.

[0215] Further, methods for the treatment of cancer and additionally for the prevention, prophylaxis, amelioration, or reduction of adverse events associated with immunotherapy with an antibody are envisaged, wherein the domain which binds to CD19 comprises a VL region comprising CDR-L1, CDR-L2 and CDR-L3 and a VH region comprising CDR-H1, CDR-H2 and CDR-H3 selected from: CDR-L1 as depicted in SEQ ID NO:314, CDR-L2 as depicted in SEQ ID NO: 315, and CDR-L3 as depicted in SEQ ID NO: 316, CDR-H1 as depicted in SEQ ID NO: 310, CDR-H2 as depicted in SEQ ID NO: 312, and CDR-H3 as depicted in SEQ ID NO: 313; and CDR-L1 as depicted in SEQ ID NO:314, CDR-L2 as depicted in SEQ ID NO: 315, and CDR-L3 as depicted in SEQ ID NO: 316, CDR-H1 as depicted in SEQ ID NO: 311, CDR-H2 as depicted in SEQ ID NO: 312, and CDR-H3 as depicted in SEQ ID NO: 313.

[0216] Further, methods for the treatment of cancer and additionally for the prevention, prophylaxis, amelioration, or reduction of adverse events associated with immunotherapy with an antibody are envisaged, wherein the domain which binds to CD19 comprises a VL region as depicted in SEQ ID NO: 309.

[0217] Further, methods for the treatment of cancer and additionally for the prevention, prophylaxis, amelioration, or reduction of adverse events associated with immunotherapy with an antibody are envisaged, wherein the domain which binds to CD19 comprises a VH region as depicted in any one of SEQ ID NO: 308.

[0218] Further, methods for the treatment of cancer and additionally for the prevention, prophylaxis, amelioration, or reduction of adverse events associated with immunotherapy with an antibody are envisaged, wherein the domain which binds to CD19 comprising a VL region and a VH region consisting a VL region as depicted in SEQ ID NO: 309 and a VH region as depicted in SEQ ID NO: 308.

[0219] Further, methods for the treatment of cancer and additionally for the prevention, prophylaxis, amelioration, or reduction of adverse events associated with immunotherapy with an antibody are envisaged, wherein a domain which binds to CD19 comprising a VL region and a VH region consisting a VL region as depicted in SEQ ID NO: 309 and a VH region as depicted in SEQ ID NO: 308, or with an antibody construct having a domain which binds to CD19 comprises a VL region comprising CDR-L1, CDR-L2 and CDR-L3 and a VH region comprising CDR-H1, CDR-H2 and CDR-H3 selected from: CDR-L1 as depicted in SEQ ID NO:314, CDR-L2 as depicted in SEQ ID NO: 315, and CDR-L3 as depicted in SEQ ID NO: 316, CDR-H1 as depicted in SEQ ID NO: 310, CDR-H2 as depicted in SEQ ID NO: 312, and CDR-H3 as depicted in SEQ ID NO: 313; and CDR-L1 as depicted in SEQ ID NO:314, CDR-L2 as depicted in SEQ ID NO: 315, and CDR-L3 as depicted in SEQ ID NO: 316, CDR-H1 as depicted in SEQ ID NO: 311, CDR-H2 as depicted in SEQ ID NO: 312, and CDR-H3 as depicted in SEQ ID NO: 313.

[0220] As mentioned above, the methods for the treatment of cancer and additionally for the prevention, prophylaxis, amelioration, or reduction of adverse events also refer to those wherein antibody constructs may be used which compete with the binding of the above specified antibody constructs or those that bind to the epitope recognized by the above antibody constructs, which are defined by specific SEQ ID Nos.

[0221] Further, the term “compete for binding” means, that the binding of the explicitly defined antibodies in the above paragraphs of this sub-aspect is reduced by competition by a competition antibody that binds to CD19, preferably to an epitope that is bound by any of the above explicitly defined antibodies. The competition antibodies may have VL and/or VH regions that differ in their amino acid sequence(s) from the explicitly described antibodies, when both, the competition antibodies and the explicitly described antibodies are co-incubated in a competition assay with target cells that express CD19, wherein both, competition antibody and explicitly defined antibody are used at equimolar concentrations in such competition assays. The competition antibody may be labelled (the explicitly defined antibody may be unlabeled or differently labelled to permit a quantification) to distinguish the number of competition antibody bound to the target antigen at the end of the competition binding assay method. The amount/number of competition antibody that binds under such circumstances to the target should be at least 50%, at least 60%, at least 70%, at least 80%, at least 90%, preferably at least 95% of all antibodies selectively binding to the target antigen. The competition antibody may comprise one or more, e.g., at least 2, 3, 4, 5, 6, 7, 8, 9, 10, 11, 12, 13, 14, 15, 16, 17, 18, 19, 20 or even more amino acid residues that are different from the explicitly disclosed antibodies. In preferred aspects of the invention, the competition antibodies have at least 1, 2, 3, 4, 5, 6, 7, 8, 9, 10, or more amino acid residues that are different from the herein described antibodies characterized by a domain which binds to CD19 comprising a VL region and a VH region consisting a VL region as depicted in SEQ ID NO: 309 and a VH region as depicted in SEQ ID NO: 308, or with an antibody construct having a domain which binds to CD19 comprises a VL region comprising CDR-L1, CDR-L2 and CDR-L3 and a VH region comprising CDR-H1, CDR-H2 and CDR-H3 selected from: CDR-L1 as depicted in SEQ ID NO:314, CDR-L2 as depicted in SEQ ID NO: 315, and CDR-L3 as depicted in SEQ ID NO: 316, CDR-H1 as depicted in SEQ ID NO: 310, CDR-H2 as depicted in SEQ ID NO: 312, and CDR-H3 as depicted in SEQ ID NO: 313; and CDR-L1 as depicted in SEQ ID NO:314, CDR-L2 as depicted in SEQ ID NO: 315, and CDR-L3 as depicted in SEQ ID NO: 316, CDR-H1 as depicted in SEQ ID NO: 311, CDR-H2 as depicted in SEQ ID NO: 312, and CDR-H3 as depicted in SEQ ID NO: 313.

(i) Therefore, the present invention relates to methods for the treatment of cancer and additionally for the prevention, prophylaxis, or reduction of adverse events associated with immunotherapy, particularly cancer immunotherapy, more particularly a blood cell-related cancer, such as leukemia or lymphoma, such as ALL, wherein an antibody construct is administered that comprises at least one domain (also referred to as “first domain”) which binds to CD19 on the surface of a target cell, and at least one other domain (also referred to as “second domain”) which binds to CD3, preferably human CD3, on the surface of a T cell, according to any one of embodiments (i) to (xiv) of general Aspect A) and as defined in this Sub-Aspect B-1, said method comprising
[0222] (a) administering at least one antibody construct referred to in the preamble, and
[0223] (b) administering an inhibitor/antagonist of TNF/TNFR that reduces TNF/TNFR signaling,
   wherein said inhibitor/antagonist of TNF/TNFR that reduces TNF/TNFR signaling referred to in (b) is for administration to a patient prior to and optionally also following administration of said antibody construct referred to in (a), Further, the present invention relates to methods for the treatment of cancer and additionally for the prevention, prophylaxis, or reduction of adverse events associated with immunotherapy, particularly cancer immunotherapy, more particularly a blood cell-related cancer, such as leukemia or lymphoma, particularly of acute lymphoblastic leukemia (ALL), wherein an antibody construct is administered that comprises at least one domain which binds to CD19 on the surface of a target cell, and at least one other domain which binds to CD3, preferably human CD3, on the surface of a T cell, according to any one of embodiments (i) to (xiv) of general Aspect A) and as further defined in embodiment (i) of Sub-Aspect B-1, said method comprising
[0224] (a) administering at least one antibody construct referred to in the preamble, and
[0225] (b) administering an inhibitor/antagonist of TNF/TNFR that reduces TNF/TNFR signaling,
   wherein said inhibitor/antagonist of TNF/TNFR that reduces TNF/TNFR signaling referred to in (b) is for administration to a patient prior to administration of said antibody construct referred to in (a), wherein said antibody construct binds to an epitope that is selectively bound by an antibody/antibody construct that has the VH chain and/or VL chain respectively, that are disclosed in WO2010052014, particularly in the sequence listing, which is hereby incorporated by reference.
   (ii) Further, the present invention relates to methods for the treatment of cancer and additionally for the prevention, prophylaxis, or reduction of adverse events associated with immunotherapy, particularly cancer immunotherapy, more particularly a blood cell-related cancer, such as leukemia or lymphoma, particularly of acute lymphoblastic leukemia (ALL), wherein an antibody construct as part of a combination product is administered that comprises at least one domain which binds to CD19 on the surface of a target cell, and at least one other domain which binds to CD3, preferably human CD3, on the surface of a T cell, according to any one of embodiments (i) to (xvi) of general Aspect A) and as further defined in embodiment (i) or (ii) of Sub-Aspect B-1, said method comprising
[0226] (a) administering at least one antibody construct referred to in the preamble, and
[0227] (b) administering an inhibitor/antagonist of TNF/TNFR that reduces TNF/TNFR signaling,
   wherein said inhibitor/antagonist of TNF/TNFR that reduces TNF/TNFR signaling referred to in (b) is also part of said combination product for administration to a patient prior to administration of said antibody construct referred to in (a), wherein said antibody construct binds to an epitope that is selectively bound by an antibody/antibody construct that has the following VH chains and/or VL chains respectively that are disclosed in WO2010052014, particularly in the sequence listing, which is hereby incorporated by reference.
   (iii) Further, the present invention relates to methods for the treatment of cancer and additionally for the prevention, prophylaxis, or reduction of adverse events associated with immunotherapy, particularly cancer immunotherapy, more particularly a blood cell-related cancer, such as leukemia or lymphoma, particularly of acute lymphoblastic leukemia (ALL), wherein an antibody construct is administered that comprises at least one domain (also referred to as “first domain”) which binds to CD 19 on the surface of a target cell, and at least one other domain (also referred to as “second domain”) which binds to CD3, preferably human CD3, on the surface of a T cell, according to any one of embodiments (i) to (xiv) of general Aspect A) and as further defined in embodiment (i) to (iii) of Sub-Aspect B-1, said method comprising
[0228] (a) administering at least one antibody construct referred to in the preamble, and
[0229] (b) administering an inhibitor/antagonist of TNF/TNFR that reduces TNF/TNFR signaling,
   wherein said inhibitor/antagonist of TNF/TNFR that reduces TNF/TNFR signaling referred to in (b) is for administration to a patient prior to and optionally also following administration of said antibody construct referred to in (a), wherein the domain which binds to CD19 comprises a VL region comprising CDR-L1, CDR-L2 and CDR-L3, wherein CDR-L1 as depicted in SEQ ID NO:314, CDR-L2 as depicted in SEQ ID NO: 315, and CDR-L3 as depicted in SEQ ID NO: 316.
   (iv) Further, the present invention relates to methods for the treatment of cancer and additionally for the prevention, prophylaxis, or reduction of adverse events associated with immunotherapy, particularly cancer immunotherapy, more particularly a blood cell-related cancer, such as leukemia or lymphoma, particularly of acute lymphoblastic leukemia (ALL), wherein an antibody construct is administered that comprises at least one domain (also referred to as “first domain”) which binds to CD19 on the surface of a target cell, and at least one other domain (also referred to as “second domain”) which binds to CD3, preferably human CD3, on the surface of a T cell, according to any one of embodiments (i) to (xiv) of general Aspect A) and as further defined in embodiment (i) to (iv) of Sub-Aspect B-1, said method comprising
[0230] (a) administering at least one antibody construct referred to in the preamble, and
[0231] (b) administering an inhibitor/antagonist of TNF/TNFR that reduces TNF/TNFR signaling,
   wherein said inhibitor/antagonist of TNF/TNFR that reduces TNF/TNFR signaling referred to in (b) is for administration to a patient prior to and optionally also following administration of said antibody construct referred to in (a), wherein the domain which binds to CD19 comprises a VH region comprising CDR-H1, CDR-H2 and CDR-H3 selected from: CDR-H1 as depicted in SEQ ID NO: 310, CDR-H2 as depicted in SEQ ID NO: 312, and CDR-H3 as depicted in SEQ ID NO: 313; CDR-H1 as depicted in SEQ ID NO: 311, CDR-H2 as depicted in SEQ ID NO: 312, and CDR-H3 as depicted in SEQ ID NO: 313.
   (v) Further, the present invention relates to methods for the treatment of cancer and additionally for the prevention, prophylaxis, or reduction of adverse events associated with immunotherapy, particularly cancer immunotherapy, more particularly a blood cell-related cancer, such as leukemia or lymphoma, particularly of acute lymphoblastic leukemia (ALL), wherein an antibody construct is administered that comprises at least one domain which binds to CD19 on the surface of a target cell, and at least one other domain which binds to CD3, preferably human CD3, on the surface of a T cell, according to any one of embodiments (i) to (xvi) of general Aspect A) and as further defined in embodiment (i) to (v) of Sub-Aspect B-1, said method comprising
[0232] (a) administering at least one antibody construct referred to in the preamble, and
[0233] (b) administering an inhibitor/antagonist of TNF/TNFR that reduces TNF/TNFR signaling,
   wherein said inhibitor/antagonist of TNF/TNFR that reduces TNF/TNFR signaling referred to in (b) is for administration to a patient prior to and optionally also following administration of said antibody construct referred to in (a), wherein the domain which binds to CD19 comprises a VL region comprising CDR-L1, CDR-L2 and CDR-L3 and a VH region comprising CDR-H1, CDR-H2 and CDR-H3 selected from: CDR-L1 as depicted in SEQ ID NO:314, CDR-L2 as depicted in SEQ ID NO: 315, and CDR-L3 as depicted in SEQ ID NO: 316, CDR-H1 as depicted in SEQ ID NO: 310, CDR-H2 as depicted in SEQ ID NO: 312, and CDR-H3 as depicted in SEQ ID NO: 313; and CDR-L1 as depicted in SEQ ID NO:314, CDR-L2 as depicted in SEQ ID NO: 315, and CDR-L3 as depicted in SEQ ID NO: 316, CDR-H1 as depicted in SEQ ID NO: 311, CDR-H2 as depicted in SEQ ID NO: 312, and CDR-H3 as depicted in SEQ ID NO: 313.
   (vi) Further, the present invention relates to methods for the treatment of cancer and additionally for the prevention, prophylaxis, or reduction of adverse events associated with immunotherapy, particularly cancer immunotherapy, more particularly a blood cell-related cancer, such as leukemia or lymphoma, particularly of acute lymphoblastic leukemia (ALL), wherein an antibody construct is administered that comprises at least one domain which binds to CD19 on the surface of a target cell, and at least one other domain which binds to CD3, preferably human CD3, on the surface of a T cell, according to any one of embodiments (i) to (xiv) of general Aspect A) and as further defined in embodiment (i) to (vi) of Sub-Aspect B-1, said method comprising
[0234] (a) administering at least one antibody construct referred to in the preamble, and
[0235] (b) administering an inhibitor/antagonist of TNF/TNFR that reduces TNF/TNFR signaling,
   wherein said inhibitor/antagonist of TNF/TNFR that reduces TNF/TNFR signaling referred to in (b) is for administration to a patient prior to and optionally also following administration of said antibody construct referred to in (a), and wherein the domain which binds to CD19 comprises a VL region as depicted in SEQ ID NO: 309.
   (vii) Further, the present invention relates to methods for the treatment of cancer and additionally for the prevention, prophylaxis, or reduction of adverse events associated with immunotherapy, particularly cancer immunotherapy, more particularly a blood cell-related cancer, such as leukemia or lymphoma, particularly of acute lymphoblastic leukemia (ALL), wherein an antibody construct is administered that comprises at least one domain which binds to CD19 on the surface of a target cell, and at least one other domain which binds to CD3, preferably human CD3, on the surface of a T cell, according to any one of embodiments (i) to (xvi) of general Aspect A) and as further defined in embodiment (i) to (vii) of Sub-Aspect B-1, said method comprising
[0236] (a) administering at least one antibody construct referred to in the preamble, and
[0237] (b) administering an inhibitor/antagonist of TNF/TNFR that reduces TNF/TNFR signaling,
   wherein said inhibitor/antagonist of TNF/TNFR that reduces TNF/TNFR signaling referred to in (b) is for administration to a patient prior to and optionally also following administration of said antibody construct referred to in (a), and wherein the domain which binds to CD19 comprises a VH region as depicted in any one of SEQ ID NO: 308.
   (viii) Further, the present invention relates to methods for the treatment of cancer and additionally for the prevention, prophylaxis, or reduction of adverse events associated with immunotherapy, particularly cancer immunotherapy, more particularly a blood cell-related cancer, such as leukemia or lymphoma, particularly of acute lymphoblastic leukemia (ALL), wherein an antibody construct is administered that comprises at least one domain which binds to CD19 on the surface of a target cell, and at least one other domain which binds to CD3, preferably human CD3, on the surface of a T cell, according to any one of embodiments (i) to (xvi) of general Aspect A) and as further defined in embodiment (i) to (viii) of Sub-Aspect B-1, said method comprising
[0238] (a) administering at least one antibody construct referred to in the preamble, and
[0239] (b) administering an inhibitor/antagonist of TNF/TNFR that reduces TNF/TNFR signaling,
   wherein said inhibitor/antagonist of TNF/TNFR that reduces TNF/TNFR signaling referred to in (b) is for administration to a patient prior to and optionally also following administration of said antibody construct referred to in (a), wherein the domain which binds to CD19 comprises a VL region and a VH region consisting a VL region as depicted in SEQ ID NO: 309 and a VH region as depicted in SEQ ID NO: 308.
   (ix) Further, the present invention relates to methods for the treatment of cancer and additionally for the prevention, prophylaxis, or reduction of adverse events associated with immunotherapy, particularly cancer immunotherapy, more particularly a blood cell-related cancer, such as leukemia or lymphoma, particularly of acute lymphoblastic leukemia (ALL), wherein an antibody construct is administered that comprises at least one domain which binds to CD19 on the surface of a target cell, and at least one other domain which binds to CD3, preferably human CD3, on the surface of a T cell, according to any one of embodiments (i) to (xvi) of general Aspect A) and as further defined in embodiment (i) to (ix) of Sub-Aspect B-1, said method comprising
[0240] (a) administering at least one antibody construct referred to in the preamble, and
[0241] (b) administering an inhibitor/antagonist of TNF/TNFR that reduces TNF/TNFR signaling,
   wherein said inhibitor/antagonist of TNF/TNFR that reduces TNF/TNFR signaling referred to in (b) is for administration to a patient prior to and optionally also following administration of said antibody construct referred to in (a), wherein the first domain which binds to CD19 competes for binding to CD19 with an antibody construct in accordance with the present invention that is characterized by a domain which binds to CD19 comprising a VL region and a VH region consisting a VL region as depicted in SEQ ID NO: 309 and a VH region as depicted in SEQ ID NO: 308, or with an antibody construct having a domain which binds to CD19 comprises a VL region comprising CDR-L1, CDR-L2 and CDR-L3 and a VH region comprising CDR-H1, CDR-H2 and CDR-H3 selected from: CDR-L1 as depicted in SEQ ID NO:314, CDR-L2 as depicted in SEQ ID NO: 315, and CDR-L3 as depicted in SEQ ID NO: 316, CDR-H1 as depicted in SEQ ID NO: 310, CDR-H2 as depicted in SEQ ID NO: 312, and CDR-H3 as depicted in SEQ ID NO: 313; and CDR-L1 as depicted in SEQ ID NO:314, CDR-L2 as depicted in SEQ ID NO: 315, and CDR-L3 as depicted in SEQ ID NO: 316, CDR-H1 as depicted in SEQ ID NO: 311, CDR-H2 as depicted in SEQ ID NO: 312, and CDR-H3 as depicted in SEQ ID NO: 313.

### Sub-Aspect B-2—Immunotherapeutic Methods for the Treatment of Cancer and Prevention, Prophylaxis of Immunotherapy-Related Adverse Events Using Constructs Binding CD33

[0242] The present invention relates also to methods for the treatment of cancer and additionally for the prevention, prophylaxis, or reduction of adverse events associated with immunotherapy, particularly cancer immunotherapy, comprising administering antibody constructs binding to CD3 and CD33. Therein disclosed cross-species constructs comprise those exemplified in WO2008119567; in Example 23, and particularly in Example 36, and respective sequences of the Sequence Listing all of which are hereby incorporated by reference.

[0243] The functionality of cross-species specific bispecific antibody constructs regarding the capability to bind to human and macaque CD33 and CD3, respectively, may be determined by FACS analysis as described in WO2008119567. Briefly, CHO cells transfected with CD3, preferably human CD3,3 as described in Example 23.1 in WO2008119567 and the CD3, preferably human CD3, positive T cell leukemia cell line HPB-ALL may be used to test the binding to human target antigens. The binding reactivity to macaque antigens may be tested by using the generated macaque CD33 transfectant as described in Example 23.2 in WO2008119567 and macaque PBMC. Flow cytometry can be performed as described in WO2008119567 to acquire and analyze the data. FACS staining and measuring of the fluorescence intensity can be performed as described in Current Protocols in Immunology (Coligan, Kruisbeek, Margulies, Shevach and Strober, Wiley-Interscience, 2002). The binding of single chain molecules, which are cross-species specific for CD33 and cross-species specific for human and non-chimpanzee primate CD3 may be determined as in WO2008119567. Bioactivity of the generated bispecific single chain antibodies can be analyzed by chromium 51 (⁵¹Cr) release in vitro cytotoxicity assays using the CD33 positive cell lines described in Examples 36, 23.1 and 23.2 as described in WO2008119567. As shown also in WO2008119567, cross-species specific bispecific single chain antibody constructs demonstrate cytotoxic activity against CD3, preferably human CD3,3 positive target cells elicited by stimulated human CD4/CD56 depleted PBMC and against macaque CD33 positive target cells elicited by the macaque T cell line 4119LnPx.

[0244] The present invention relates to methods for the treatment of cancer and additionally for the prevention, prophylaxis, or reduction of adverse events associated with immunotherapy, particularly immunotherapy of blood cancer, more particularly of leukemia, for example of AML, for the antibody construct used in accordance with the present invention that the domain which selectively binds to CD33 comprises a VL region comprising CDR-L1, CDR-L2 and CDR-L3 selected from: CDR-L1 as depicted in SEQ ID NO: 317, CDR-L2 as depicted in SEQ ID NO: 318, and CDR-L3 as depicted in SEQ ID NO: 319; CDR-L1 as depicted in SEQ ID NO: 320, CDR-L2 as depicted in SEQ ID NO: 318, and CDR-L3 as depicted in SEQ ID NO: 319; CDR-L1 as depicted in SEQ ID NO: 317, CDR-L2 as depicted in SEQ ID NO: 321, and CDR-L3 as depicted in SEQ ID NO: 319; and CDR-L1 as depicted in SEQ ID NO: 322, CDR-L2 as depicted in SEQ ID NO: 318, and CDR-L3 as depicted in SEQ ID NO: 319.

[0245] The present invention relates to methods for the treatment of cancer and additionally for the prevention, prophylaxis, or reduction of adverse events associated with immunotherapy, particularly immunotherapy of blood cancer, more particularly of leukemia, for example of AML, for the antibody construct used in accordance with the present invention, wherein the domain which selectively binds to CD33 comprises a VH region comprising CDR-H1, CDR-H2 and CDR-H3 selected from: CDR-H1 as depicted in SEQ ID NO: 323, CDR-H2 as depicted in SEQ ID NO: 324, and CDR-H3 as depicted in SEQ ID NO: 325, which is preferred; CDR-H1 as depicted in SEQ ID NO: 323, CDR-H2 as depicted in SEQ ID NO: 326, and CDR-H3 as depicted in SEQ ID NO: 325; and CDR-H1 as depicted in SEQ ID NO: 323; CDR-H2 as depicted in SEQ ID NO: 327, and CDR-H3 as depicted in SEQ ID NO: 325.

[0246] The present invention relates to methods for the treatment of cancer and additionally for the prevention, prophylaxis, or reduction of adverse events associated with immunotherapy, particularly immunotherapy of blood cancer, more particularly of leukemia, for example of AML, for the antibody construct used in accordance with the present invention, wherein the domain which selectively binds to CD33 comprises a VL region selected from the group of VL regions as depicted in any one of SEQ ID NOs 328, 329, 330, 331, and 332.

[0247] The present invention relates to methods for the treatment of cancer and additionally for the prevention, prophylaxis, or reduction of adverse events associated with immunotherapy, particularly immunotherapy of blood cancer, more particularly of leukemia, for example of AML, for the antibody construct used in accordance with the present invention, wherein the domain which selectively binds to CD33 comprises a VH region selected from the group consisting of a VH regions as depicted in any one of SEQ ID Nos. 333, 334, 335, 336, 337, 338 and 339.

[0248] The present invention relates to methods for the treatment of cancer and additionally for the prevention, prophylaxis, or reduction of adverse events associated with immunotherapy, particularly immunotherapy of blood cancer, more particularly of leukemia, for example of AML, for the antibody construct used in accordance with the present invention, wherein the domain which selectively binds to CD33 comprises a VL region and a VH region selected from the group comprising a pair of a VL region and a VH region as depicted in SEQ ID Nos: 328+333, 328+334, 328+335, 328+336, 328+337, 328+338, 328+339, 329+333, 329+334, 329+335, 329+336, 329+337, 329+338, 329+339, 330+333, 330+334, 330+335, 330+336, 330+337, 330+338, 330+339, 331+333, 331+333, 331+334, 331+335, 331+336, 331+337, 331+338, 331+339, 332+333, 332+334, 332+335, 332+336, 332+337, 332+338, and 332+339.

[0249] The present invention relates to methods for the treatment of cancer and additionally for the prevention, prophylaxis, or reduction of adverse events associated with immunotherapy, particularly immunotherapy of blood cancer, more particularly of leukemia, for example of AML, for the antibody construct used in accordance with the present invention, wherein the domain which selectively binds to CD33 comprises CDR-L CDR-L2 and CDR-L3 and CDR-H1, CDR-H2 and CDR-H3 as depicted in the following groups of sequences: CDR-L1 as depicted in SEQ ID NO: 317, CDR-L2 as depicted in SEQ ID NO: 318, CDR-L3 as depicted in SEQ ID NO: 319, and CDR-H1 as depicted in SEQ ID NO: 323, CDR-H2 as depicted in SEQ ID NO: 324, and CDR-H3 as depicted in SEQ ID NO: 325, which is the preferred group; CDR-L1 as depicted in SEQ ID NO: 320, CDR-L2 as depicted in SEQ ID NO: 318, CDR-L3 as depicted in SEQ ID NO: 319, and CDR-H1 as depicted in SEQ ID NO: 323, CDR-H2 as depicted in SEQ ID NO: 324, and CDR-H3 as depicted in SEQ ID NO: 325; CDR-L1 as depicted in SEQ ID NO: 317, CDR-L2 as depicted in SEQ ID NO: 321, CDR-L3 as depicted in SEQ ID NO: 319; and CDR-H1 as depicted in SEQ ID NO: 323, CDR-H2 as depicted in SEQ ID NO: 324, and CDR-H3 as depicted in SEQ ID NO: 325; CDR-L1 as depicted in SEQ ID NO: 322, CDR-L2 as depicted in SEQ ID NO: 318, CDR-L3 as depicted in SEQ ID NO: 319, and CDR-H1 as depicted in SEQ ID NO: 323, CDR-H2 as depicted in SEQ ID NO: 324, and CDR-H3 as depicted in SEQ ID NO: 325; CDR-L1 as depicted in SEQ ID NO: 317, CDR-L2 as depicted in SEQ ID NO: 318, CDR-L3 as depicted in SEQ ID NO: 319, and CDR-H1 as depicted in SEQ ID NO: 323, CDR-H2 as depicted in SEQ ID NO: 326, and CDR-H3 as depicted in SEQ ID NO: 325; CDR-L1 as depicted in SEQ ID NO: 320, CDR-L2 as depicted in SEQ ID NO: 318, CDR-L3 as depicted in SEQ ID NO: 319, and CDR-H1 as depicted in SEQ ID NO: 323, CDR-H2 as depicted in SEQ ID NO: 326, and CDR-H3 as depicted in SEQ ID NO: 325; CDR-L1 as depicted in SEQ ID NO: 317, CDR-L2 as depicted in SEQ ID NO: 321, CDR-L3 as depicted in SEQ ID NO: 319; and CDR-H1 as depicted in SEQ ID NO: 323, CDR-H2 as depicted in SEQ ID NO: 326, and CDR-H3 as depicted in SEQ ID NO: 325; CDR-L1 as depicted in SEQ ID NO: 322, CDR-L2 as depicted in SEQ ID NO: 318, CDR-L3 as depicted in SEQ ID NO: 319, and CDR-H1 as depicted in SEQ ID NO: 323, CDR-H2 as depicted in SEQ ID NO: 326, and CDR-H3 as depicted in SEQ ID NO: 325; CDR-L1 as depicted in SEQ ID NO: 317, CDR-L2 as depicted in SEQ ID NO: 318, CDR-L3 as depicted in SEQ ID NO: 319, and CDR-H1 as depicted in SEQ ID NO: 323; CDR-H2 as depicted in SEQ ID NO: 327, and CDR-H3 as depicted in SEQ ID NO: 325; CDR-L1 as depicted in SEQ ID NO: 320, CDR-L2 as depicted in SEQ ID NO: 318, CDR-L3 as depicted in SEQ ID NO: 319, and CDR-H1 as depicted in SEQ ID NO: 323; CDR-H2 as depicted in SEQ ID NO: 327, and CDR-H3 as depicted in SEQ ID NO: 325; CDR-L1 as depicted in SEQ ID NO: 317, CDR-L2 as depicted in SEQ ID NO: 321, CDR-L3 as depicted in SEQ ID NO: 319; and CDR-H1 as depicted in SEQ ID NO: 323; CDR-H2 as depicted in SEQ ID NO: 327, and CDR-H3 as depicted in SEQ ID NO: 325; CDR-L1 as depicted in SEQ ID NO: 322, CDR-L2 as depicted in SEQ ID NO: 318, CDR-L3 as depicted in SEQ ID NO: 319, and CDR-H1 as depicted in SEQ ID NO: 323; CDR-H2 as depicted in SEQ ID NO: 327, and CDR-H3 as depicted in SEQ ID NO: 325.

[0250] The present invention relates to methods for the treatment of cancer and additionally for the prevention, prophylaxis, or reduction of adverse events associated with immunotherapy, particularly immunotherapy of blood cancer, more particularly of leukemia, for example of AML, for the antibody construct used in accordance with the present invention, wherein the domain which selectively binds to CD33 comprises a VL region comprising CDR-L1, CDR-L2 and CDR-L3 and a VH region comprising CDR-H1, CDR-H2 and CDR-H3 consisting of pairs selected from the group consisting of SEQ ID Nos. 328+333, 328+334, 328+335, 328+336, 328+337, 328+338, 328+339, 329+333, 329+334, 329+335, 329+336, 329+337, 329+338, 329+339, 330+333, 330+334, 330+335, 330+336, 330+337, 330+338, 330+339, 331+333, 331+333, 331+334, 331+335, 331+336, 331+337, 331+338, 331+339, 332+333, 332+334, 332+335, 332+336, 332+337, 332+338, and 332+339.

[0251] It is also envisaged for the antibody construct used in the methods in accordance with the present invention that the domain which selectively binds to an epitope of CD33 that it competes with those explicitly recited herein, i.e. those characterized by specific SEQ ID Nos.

[0252] Whether or not an antibody construct binds to the same epitope of CD33 as another given antibody construct can be measured e.g. by epitope mapping with chimeric or truncated target molecules, e.g. as described herein above and in the Examples in WO2017021362.

[0253] Further, whether an antibody construct competes for binding with another given antibody construct can be measured in a competition assay such as a competitive ELISA or a cell-based competition assay. Avidin-coupled microparticles (beads) can also be used. Like an avidin-coated ELISA plate, when reacted with a biotinylated protein, each of these beads can be used as a substrate on which an assay can be performed. Antigen is coated onto a bead and then precoated with the first antibody. The second antibody is added, and any additional binding is determined. Possible means for the read-out includes flow cytometry.

(i) Accordingly, methods of the invention for the treatment of cancer and the prevention, prophylaxis, amelioration or reduction of adverse events associated with immunotherapy, particularly cancer immunotherapy, particularly of leukemia, very particularly of AML, comprise the administration of an antibody construct comprising at least one domain (also referred to as “first domain”) which binds to a target antigen on the surface of a target cell, and at least one other domain (also referred to as “second domain”) which binds to CD3, preferably human CD3, on the surface of a T cell according to any one of embodiments (i) to (xiv), of Aspect A) and/or the introductory sections of Sub-Aspect B-2, said methods comprising
[0254] (a) administering at least one antibody construct referred to in the preamble, and
[0255] (b) administering an inhibitor/antagonist of TNF/TNFR that reduces TNF/TNFR signaling,
   wherein said inhibitor/antagonist of TNF/TNFR that reduces TNF/TNFR signaling referred to in (b) is for administration to a patient prior to and optionally also following administration of said antibody construct referred to in (a), wherein the first domain binds selectively to CD33.
   (ii) Further, the present invention relates to methods of the invention for the treatment of cancer and the prevention, prophylaxis, amelioration or reduction of adverse events associated with immunotherapy, particularly cancer immunotherapy, particularly of leukemia, very particularly of AML, comprise the administration of an antibody construct that comprises at least one domain which binds to CD33 on the surface of a target cell, and at least one other domain which binds to CD3, preferably human CD3, on the surface of a T cell, according to any one of embodiments (i) to (xiv) of general Aspect A) and as further defined in embodiment (i) of Sub-Aspect B-2, said method comprising
[0256] (a) administering at least one antibody construct referred to in the preamble, and
[0257] (b) administering an inhibitor/antagonist of TNF/TNFR that reduces TNF/TNFR signaling,
   wherein said inhibitor/antagonist of TNF/TNFR that reduces TNF/TNFR signaling referred to in (b) is for administration/administered to a patient prior to administration of said antibody construct referred to in (a), and wherein said antibody construct binds to CD33 that is selectively bound by an antibody/antibody construct that has the following CDRs of the VH chain and/or VL chain selected from the group comprising: a VL region comprising CDR-L1, CDR-L2 and CDR-L3 selected from: CDR-L1 as depicted in SEQ ID NO: 317, CDR-L2 as depicted in SEQ ID NO: 318, and CDR-L3 as depicted in SEQ ID NO: 319, which is preferred; CDR-L1 as depicted in SEQ ID NO: 320, CDR-L2 as depicted in SEQ ID NO: 318, and CDR-L3 as depicted in SEQ ID NO: 319; CDR-L1 as depicted in SEQ ID NO: 317, CDR-L2 as depicted in SEQ ID NO: 321, and CDR-L3 as depicted in SEQ ID NO: 319; CDR-L1 as depicted in SEQ ID NO: 322, CDR-L2 as depicted in SEQ ID NO: 318, and CDR-L3 as depicted in SEQ ID NO: 319; a VH region comprising CDR-H1, CDR-H2 and CDR-H3 selected from: CDR-H1 as depicted in SEQ ID NO: 323, CDR-H2 as depicted in SEQ ID NO: 324, and CDR-H3 as depicted in SEQ ID NO: 325, which is preferred; CDR-H1 as depicted in SEQ ID NO: 323, CDR-H2 as depicted in SEQ ID NO: 326, and CDR-H3 as depicted in SEQ ID NO: 325; and CDR-H1 as depicted in SEQ ID NO: 323; CDR-H2 as depicted in SEQ ID NO: 327, and CDR-H3 as depicted in SEQ ID NO: 325.
   (iii) Further, to the present invention relates to methods of the invention for the treatment of cancer and the prevention, prophylaxis, amelioration or reduction of adverse events associated with immunotherapy, particularly cancer immunotherapy, particularly of leukemia, very particularly of AML, comprise the administration of an antibody construct that comprises at least one domain which binds to CD33 on the surface of a target cell, and at least one other domain which binds to CD3, preferably human CD3, on the surface of a T cell, according to any one of embodiments (i) to (xiv) of general Aspect A) and as further defined in embodiment (i) or (ii) of Sub-Aspect B-2, said method comprising
[0258] (a) administering at least one antibody construct referred to in the preamble, and
[0259] (b) administering an inhibitor/antagonist of TNF/TNFR that reduces TNF/TNFR signaling,
   wherein said inhibitor/antagonist of TNF/TNFR that reduces TNF/TNFR signaling referred to in (b) is for administration to a patient prior to and optionally also following administration of said antibody construct referred to in (a), wherein said antibody construct binds to CD33 that is selectively bound by an antibody/antibody construct that comprises a VL chain region selected from the group of VL chain regions as depicted in any one of SEQ ID NOs 328, 329, 330, 331, and 332.
   (iv) Further, the present invention relates to methods of the invention for the treatment of cancer and the prevention, prophylaxis, amelioration or reduction of adverse events associated with immunotherapy, particularly cancer immunotherapy, particularly of leukemia, very particularly of AML, comprise the administration of an antibody construct that comprises at least one domain which binds to CD33 on the surface of a target cell on the surface of a target cell, and at least one other domain which binds to CD3, preferably human CD3, on the surface of a T cell, according to any one of embodiments (i) to (xiv) of general Aspect A) and as further defined in embodiment (i) to (iii) of Sub-Aspect B-2, said method comprising
[0260] (a) administering at least one antibody construct referred to in the preamble, and
[0261] (b) administering an inhibitor/antagonist of TNF/TNFR that reduces TNF/TNFR signaling,
   wherein said inhibitor/antagonist of TNF/TNFR that reduces TNF/TNFR signaling referred to in (b) is for administration to a patient prior to and optionally also following administration of said antibody construct referred to in (a), and wherein said antibody construct binds to CD33 that is selectively bound by an antibody/antibody construct that comprises a VH chain region selected from the group of VH chain regions as depicted in any one of SEQ ID Nos. 333, 334, 335, 336, 337, 338 and 339.
   (v) Further, the present invention relates to methods of the invention for the treatment of cancer and the prevention, prophylaxis, amelioration or reduction of adverse events associated with immunotherapy, particularly cancer immunotherapy, particularly of leukemia, very particularly of AML, comprise the administration of an antibody construct that comprises at least one domain which binds to CD33 on the surface of a target cell on the surface of a target cell, and at least one other domain which binds to CD3, preferably human CD3, on the surface of a T cell, according to any one of embodiments (i) to (xiv) of general Aspect A) and as further defined in embodiment (i) to (iv) of Sub-Aspect B-2, said method comprising
[0262] (a) administering at least one antibody construct referred to in the preamble, and
[0263] (b) administering an inhibitor/antagonist of TNF/TNFR that reduces TNF/TNFR signaling,
   wherein said inhibitor/antagonist of TNF/TNFR that reduces TNF/TNFR signaling referred to in (b) is for administration to a patient prior to and optionally also following administration of said antibody construct referred to in (a), particularly wherein the patient is not a rodent, and more particularly, wherein the patient is either a human being or a non-human primate, and wherein said domain binding to CD33 comprises a

[0264] VL region and a VH region selected from the group of pairs of a VL region and a VH region depicted in SEQ ID Nos: 328+333, 328+334, 328+335, 328+336, 328+337, 328+338, 328+339, 329+333, 329+334, 329+335, 329+336, 329+337, 329+338, 329+339, 330+333, 330+334, 330+335, 330+336, 330+337, 330+338, 330+339, 331+333, 331+333, 331+334, 331+335, 331+336, 331+337, 331+338, 331+339, 332+333, 332+334, 332+335, 332+336, 332+337, 332+338, and 332+339.

(vi) Further, the present invention relates to methods of the invention for the treatment of cancer and the prevention, prophylaxis, amelioration or reduction of adverse events associated with immunotherapy, particularly cancer immunotherapy, particularly of leukemia, very particularly of AML, comprise the administration of an antibody construct that comprises at least one domain which binds to CD33 on the surface of a target cell on the surface of a target cell, and at least one other domain which binds to CD3, preferably human CD3, on the surface of a T cell, according to any one of embodiments (i) to (xiv) of general Aspect A) and as further defined in embodiment (i) to (v) of Sub-Aspect B-2, said method comprising
[0265] (a) administering at least one antibody construct referred to in the preamble, and
[0266] (b) administering an inhibitor/antagonist of TNF/TNFR that reduces TNF/TNFR signaling,
   wherein said inhibitor/antagonist of TNF/TNFR that reduces TNF/TNFR signaling referred to in (b) is for administration to a patient prior to and optionally also following administration of said antibody construct referred to in (a), wherein said domain binding to CD33 comprises CDR-L1, CDR-L2 and CDR-L3 and CDR-H1, CDR-H2 and CDR-H3 as depicted in the following groups of sequences: CDR-L1 as depicted in SEQ ID NO: 317, CDR-L2 as depicted in SEQ ID NO: 318, CDR-L3 as depicted in SEQ ID NO: 319, and CDR-H1 as depicted in SEQ ID NO: 323, CDR-H2 as depicted in SEQ ID NO: 324, and CDR-H3 as depicted in SEQ ID NO: 325, which is preferred; CDR-L1 as depicted in SEQ ID NO: 320, CDR-L2 as depicted in SEQ ID NO: 318, CDR-L3 as depicted in SEQ ID NO: 319, and CDR-H1 as depicted in SEQ ID NO: 323, CDR-H2 as depicted in SEQ ID NO: 324, and CDR-H3 as depicted in SEQ ID NO: 325; CDR-L1 as depicted in SEQ ID NO: 317, CDR-L2 as depicted in SEQ ID NO: 321, CDR-L3 as depicted in SEQ ID NO: 319; and CDR-H1 as depicted in SEQ ID NO: 323, CDR-H2 as depicted in SEQ ID NO: 324, and CDR-H3 as depicted in SEQ ID NO: 325; CDR-L1 as depicted in SEQ ID NO: 322, CDR-L2 as depicted in SEQ ID NO: 318, CDR-L3 as depicted in SEQ ID NO: 319, and CDR-H1 as depicted in SEQ ID NO: 323, CDR-H2 as depicted in SEQ ID NO: 324, and CDR-H3 as depicted in SEQ ID NO: 325; CDR-L1 as depicted in SEQ ID NO: 317, CDR-L2 as depicted in SEQ ID NO: 318, CDR-L3 as depicted in SEQ ID NO: 319, and CDR-H1 as depicted in SEQ ID NO: 323, CDR-H2 as depicted in SEQ ID NO: 326, and CDR-H3 as depicted in SEQ ID NO: 325; CDR-L1 as depicted in SEQ ID NO: 320, CDR-L2 as depicted in SEQ ID NO: 318, CDR-L3 as depicted in SEQ ID NO: 319, and CDR-H1 as depicted in SEQ ID NO: 323, CDR-H2 as depicted in SEQ ID NO: 326, and CDR-H3 as depicted in SEQ ID NO: 325; CDR-L1 as depicted in SEQ ID NO: 317, CDR-L2 as depicted in SEQ ID NO: 321, CDR-L3 as depicted in SEQ ID NO: 319; and CDR-H1 as depicted in SEQ ID NO: 323, CDR-H2 as depicted in SEQ ID NO: 326, and CDR-H3 as depicted in SEQ ID NO: 325; CDR-L1 as depicted in SEQ ID NO: 322, CDR-L2 as depicted in SEQ ID NO: 318, CDR-L3 as depicted in SEQ ID NO: 319, and CDR-H1 as depicted in SEQ ID NO: 323, CDR-H2 as depicted in SEQ ID NO: 326, and CDR-H3 as depicted in SEQ ID NO: 325; CDR-L1 as depicted in SEQ ID NO: 317, CDR-L2 as depicted in SEQ ID NO: 318, CDR-L3 as depicted in SEQ ID NO: 319, and CDR-H1 as depicted in SEQ ID NO: 323; CDR-H2 as depicted in SEQ ID NO: 327, and CDR-H3 as depicted in SEQ ID NO: 325; CDR-L1 as depicted in SEQ ID NO: 320, CDR-L2 as depicted in SEQ ID NO: 318, CDR-L3 as depicted in SEQ ID NO: 319, and CDR-H1 as depicted in SEQ ID NO: 323; CDR-H2 as depicted in SEQ ID NO: 327, and CDR-H3 as depicted in SEQ ID NO: 325; CDR-L1 as depicted in SEQ ID NO: 317, CDR-L2 as depicted in SEQ ID NO: 321, CDR-L3 as depicted in SEQ ID NO: 319; and CDR-H1 as depicted in SEQ ID NO: 323; CDR-H2 as depicted in SEQ ID NO: 327, and CDR-H3 as depicted in SEQ ID NO: 325; CDR-L1 as depicted in SEQ ID NO: 322, CDR-L2 as depicted in SEQ ID NO: 318, CDR-L3 as depicted in SEQ ID NO: 319, and CDR-H1 as depicted in SEQ ID NO: 323; CDR-H2 as depicted in SEQ ID NO: 327, and CDR-H3 as depicted in SEQ ID NO: 325.
   (vii) The present invention relates also to methods of the invention for the treatment of cancer and the prevention, prophylaxis, amelioration or reduction of adverse events associated with immunotherapy, particularly cancer immunotherapy, particularly of leukemia, very particularly of AML, comprise the administration of an antibody construct that comprises at least one domain which binds to CD33 on the surface of a target cell on the surface of a target cell, and at least one other domain which binds to CD3, preferably human CD3, on the surface of a T cell, according to any one of embodiments (i) to (xiv) of general Aspect A) and as further defined in embodiment (i) to (vi) of Sub-Aspect B-2, said method comprising
[0267] (a) administering at least one antibody construct referred to in the preamble, and
[0268] (b) administering an inhibitor/antagonist of TNF/TNFR that reduces TNF/TNFR signaling,
   wherein said inhibitor/antagonist of TNF/TNFR that reduces TNF/TNFR signaling referred to in (b) is for administration to a patient prior to and optionally also following administration of said antibody construct referred to in (a), wherein said domain binding to CD33 comprises a VL region that comprises CDR-L1, CDR-L2 and CDR-L3 and a VH region comprising CDR-H1, CDR-H2 and CDR-H3 selected from SEQ ID NOs: 328+333, 328+334, 328+335, 328+336, 328+337, 328+338, 328+339, 329+333, 329+334, 329+335, 329+336, 329+337, 329+338, 329+339, 330+333, 330+334, 330+335, 330+336, 330+337, 330+338, 330+339, 331+333, 331+333, 331+334, 331+335, 331+336, 331+337, 331+338, 331+339, 332+333, 332+334, 332+335, 332+336, 332+337, 332+338, and 332+339.
   (viii) The present invention relates also to methods of the invention for the treatment of cancer and the prevention, prophylaxis, amelioration or reduction of adverse events associated with immunotherapy, particularly cancer immunotherapy, particularly of leukemia, very particularly of AML, comprise the administration of an antibody construct that comprises at least one domain which binds to CD33 on the surface of a target cellon the surface of a target cell, and at least one other domain which binds to CD3, preferably human CD3, on the surface of a T cell, according to any one of embodiments (i) to (xiv) of general Aspect A) and as further defined in embodiment (i) to (vii) of Sub-Aspect B-2, said method comprising
[0269] (a) administering at least one antibody construct referred to in the preamble, and
[0270] (b) administering an inhibitor/antagonist of TNF/TNFR that reduces TNF/TNFR signaling,
   wherein said inhibitor/antagonist of TNF/TNFR that reduces TNF/TNFR signaling referred to in (b) is for administration to a patient prior to and optionally also following administration of said antibody construct referred to in (a), wherein the first domain which binds to CD33 competes for binding to CD33 with an antibody construct as defined in any one of embodiments (i) to (vii) of Sub-Aspect B-2) or wherein the first domain binds to the same epitope on CD33 as those referred to in any of the above Sub-Aspect B-2).

### Sub-Aspect B-3—Immunotherapeutic Methods for the Treatment of Cancer and Prevention, Prophylaxis of Immunotherapy-Related Adverse Events Using Constructs Binding FLT3

[0271] In accordance with the present invention, antibody constructs binding to CD3 and FLT3 comprise those exemplified in WO2017021362, the contents of which are hereby incorporated by reference.

[0272] Fms-like tyrosine kinase 3 (FLT3) also known as fetal liver kinase 2 (FLK-2), human stem cell kinase 1 (SCK-1) or Cluster of Differentiation antigen (CD135) is a hematopoietic receptor tyrosine kinase that was cloned by two independent groups in the 1990s. The FLT3 gene, located on chromosome 13q12 in humans encodes a Class III receptor tyrosine kinase protein that shares homology with other Class III family members including stem cell factor receptor (c-KIT), macrophage colony-stimulating factor receptor (FMS) and platelet-derived growth factor receptor (PDGFR). Human FLT3 is expressed in CD34+CD38-hematopoietic stem cells (HSC) as well as in a subset of dendritic precursor cells. The most common FLT3 mutation in Acute Myeloid Leukemia (AML) is the FLT3 internal tandem duplication (FLT3-ITD) that is found in 20 to 38% of patients with cytogenetically normal AML. FLT3-ITDs are formed when a portion of the juxtamembrane domain coding sequence gets duplicated and inserted in a head to tail orientation. FLT3 mutations have not been identified in patients with chronic lymphoid leukemia (CLL), non-Hodgkin's lymphoma and multiple myeloma suggesting strong disease specificity for AML. Mutant FLT3 activation is generally observed across all FAB subtypes, however, it is significantly increased in AML patients with FAB M5 (monocytic leukemia), while FAB subtypes M2 and M6 (granulocytic or erythroid leukemia) are significantly less frequently associated with FLT3 activation, in line with normal expression patterns of FLT3. A small percentage of AML patients (5-7%) present with single amino acid mutations in the FLT3 tyrosine kinase domain (FLT3 TKD), most commonly at D835 or in some cases at T842 or 1836 while even fewer patients (˜1%) harbor mutations in the FLT3 juxtamembrane domain involving residues 579, 590, 591 and 594. Patients with FLT3-ITD mutant AML have an aggressive form of disease characterized by early relapse and poor survival, while overall survival and event-free survival are not significantly influenced by presence of FLT3-TKD mutations. Furthermore, AML patients with FLT3-ITD mutation with concurrent TET2 or DNMT3A mutations have an unfavorable overall risk profile compared to FLT3-ITD mutant AML patients with wild-type TET2 or DNMT3A underscoring the clinical and biological heterogeneity of AML. The selective FLT3-targeting antibody domains disclosed in WO2017021362 are also subject matter of the present invention.

[0273] Accordingly, antibody constructs used in combination products, kits, or used in methods according to the present invention comprise a first binding domain which binds to human FLT3 on the surface of a target cell and a second binding domain which binds to CD3, preferably human CD3, on the surface of a T cell, wherein the first binding domain binds to an epitope of FLT3 which is comprised within the region of the human FLT3 having a sequence as depicted in SEQ ID NO: 814 (cluster 1) or SEQ ID NO: 816 (cluster 3) that are disclosed in WO2017021362.

[0274] The present invention relates to methods for the treatment and further for the prevention, prophylaxis, or reduction of adverse events associated with immunotherapy, particularly cancer immunotherapy, more particularly a leukemia, very particularly AML, wherein the first binding domain of the antibody constructs that may be present in combination products, comprises a VH region comprising CDR-H1, CDR-H2 and CDR-H3 and a VL region comprising CDR-L1, CDR-L2 and CDR-L3 selected from the group comprising: 341-346, SEQ ID NOs: 351-356, SEQ ID NOs: 361-366, SEQ ID NOs: 371-376, SEQ ID NOs: 381-386, SEQ ID NOs: 391-396, SEQ ID NOs: 401-406, SEQ ID NOs: 411-416, SEQ ID NOs: 421-426, SEQ ID NOs: 431-436, SEQ ID NOs: 441-446, SEQ ID NOs: 451-456, SEQ ID NOs: 461-466, SEQ ID NOs: 471-476, SEQ ID NOs: 481-486, SEQ ID NOs: 491-496, SEQ ID NOs: 501-506, SEQ ID NOs: 511-516, SEQ ID NOs: 521-526, SEQ ID NOs: 531-536, SEQ ID NOs: 541-546, SEQ ID NOs: 551-556, SEQ ID NOs: 561-566, SEQ ID NOs: 571-576, SEQ ID NOs: 581-586, SEQ ID NOs: 591-596, SEQ ID NOs: 601-606, SEQ ID NOs: 611-616, SEQ ID NOs: 621-626, SEQ ID NOs: 631-636, SEQ ID NOs: 641-646, SEQ ID NOs: 651-656, SEQ ID NOs: 661-666, SEQ ID NOs: 671-676, SEQ ID NOs: 681-686, SEQ ID NOs: 691-696, SEQ ID NOs: 701-706, SEQ ID NOs: 711-716, SEQ ID NOs: 721-726, SEQ ID NOs: 731-736, SEQ ID NOs: 741-746, SEQ ID NOs: 751-756, SEQ ID NOs: 761-766, SEQ ID NOs: 771-776, SEQ ID NOs: 781-786, SEQ ID NOs: 791-796, SEQ ID NOs: 801-806, SEQ ID NOs: 811-816, SEQ ID NOs: 821-826, SEQ ID NOs: 831-836, SEQ ID NOs: 841-846, SEQ ID NOs: 851-856, SEQ ID NOs: 861-866, SEQ ID NOs: 871-876, SEQ ID NOs: 881-886, SEQ ID NOs: 891-896, SEQ ID NOs: 901-906, SEQ ID NOs: 911-916, SEQ ID NOs: 921-926, SEQ ID NOs: 931-936, SEQ ID NOs: 941-946, SEQ ID NOs: 951-956, SEQ ID NOs: 961-966, SEQ ID NOs: 971-976, SEQ ID NOs: 981-986, particularly SEQ ID Nos: 561-566, SEQ ID Nos: 751-756, SEQ ID NOs: 721-726, and preferably SEQ ID NOs: 721-726.

[0275] The present invention relates to methods for the treatment and further for the prevention, prophylaxis, or reduction of adverse events associated with immunotherapy, particularly cancer immunotherapy, more particularly a leukemia, very particularly AML, wherein the first binding domain of the antibody constructs that may be present in form of combination products, binds to human FLT3 on the surface of a target cell binds to the same epitope of FLT3 as an antibody selected from the group consisting of FL-1 to FL-65 disclosed in WO2017021362, i.e., constructs comprising a VH region comprising CDR-H1, CDR-H2 and CDR-H3 and a VL region comprising CDR-L1, CDR-L2 and CDR-L3 selected from the group comprising: 341-346, SEQ ID NOs: 351-356, SEQ ID NOs: 361-366, SEQ ID NOs: 371-376, SEQ ID NOs: 381-386, SEQ ID NOs: 391-396, SEQ ID NOs: 401-406, SEQ ID NOs: 411-416, SEQ ID NOs: 421-426, SEQ ID NOs: 431-436, SEQ ID NOs: 441-446, SEQ ID NOs: 451-456, SEQ ID NOs: 461-466, SEQ ID NOs: 471-476, SEQ ID NOs: 481-486, SEQ ID NOs: 491-496, SEQ ID NOs: 501-506, SEQ ID NOs: 511-516, SEQ ID NOs: 521-526, SEQ ID NOs: 531-536, SEQ ID NOs: 541-546, SEQ ID NOs: 551-556, SEQ ID NOs: 561-566, SEQ ID NOs: 571-576, SEQ ID NOs: 581-586, SEQ ID NOs: 591-596, SEQ ID NOs: 601-606, SEQ ID NOs: 611-616, SEQ ID NOs: 621-626, SEQ ID NOs: 631-636, SEQ ID NOs: 641-646, SEQ ID NOs: 651-656, SEQ ID NOs: 661-666, SEQ ID NOs: 671-676, SEQ ID NOs: 681-686, SEQ ID NOs: 691-696, SEQ ID NOs: 701-706, SEQ ID NOs: 711-716, SEQ ID NOs: 721-726, SEQ ID NOs: 731-736, SEQ ID NOs: 741-746, SEQ ID NOs: 751-756, SEQ ID NOs: 761-766, SEQ ID NOs: 771-776, SEQ ID NOs: 781-786, SEQ ID NOs: 791-796, SEQ ID NOs: 801-806, SEQ ID NOs: 811-816, SEQ ID NOs: 821-826, SEQ ID NOs: 831-836, SEQ ID NOs: 841-846, SEQ ID NOs: 851-856, SEQ ID NOs: 861-866, SEQ ID NOs: 871-876, SEQ ID NOs: 881-886, SEQ ID NOs: 891-896, SEQ ID NOs: 901-906, SEQ ID NOs: 911-916, SEQ ID NOs: 921-926, SEQ ID NOs: 931-936, SEQ ID NOs: 941-946, SEQ ID NOs: 951-956, SEQ ID NOs: 961-966, SEQ ID NOs: 971-976, SEQ ID NOs: 981-986, particularly SEQ ID Nos: 561-566, SEQ ID Nos: 751-756, SEQ ID NOs: 721-726, and preferably SEQ ID NOs: 721-726.

[0276] The present invention relates to methods for the treatment and further for the prevention, prophylaxis, or reduction of adverse events associated with immunotherapy, particularly cancer immunotherapy, more particularly a leukemia, very particularly AML, wherein the first binding domain of the antibody constructs that may be present in combination products, comprises a VL region comprising CDR-L1, CDR-L2 and CDR-L3 selected from those depicted in: SEQ ID NOs: 344-346, SEQ ID NOs: 354-356, SEQ ID NOs: 364-366, SEQ ID NOs: 374-376, SEQ ID NOs: 384-386, SEQ ID NOs: 394-396, SEQ ID NOs: 404-406, SEQ ID NOs: 414-416, SEQ ID NOs: 424-426, SEQ ID NOs: 434-436, SEQ ID NOs: 444-446, SEQ ID NOs: 454-456, SEQ ID NOs: 464-466, SEQ ID NOs: 474-476, SEQ ID NOs: 484-486, SEQ ID NOs: 494-496, SEQ ID NOs: 504-506, SEQ ID NOs: 514-516, SEQ ID NOs: 524-526, SEQ ID NOs: 534-536, SEQ ID NOs: 544-546, SEQ ID NOs: 554-556, SEQ ID NOs: 564-566, SEQ ID NOs: 574-576, SEQ ID NOs: 584-586, SEQ ID NOs: 594-596, SEQ ID NOs: 604-606, SEQ ID NOs: 614-616, SEQ ID NOs: 624-626, SEQ ID NOs: 634-636, SEQ ID NOs: 644-646, SEQ ID NOs: 654-656, SEQ ID NOs: 664-666, SEQ ID NOs: 674-676, SEQ ID NOs: 684-686, SEQ ID NOs: 694-696, SEQ ID NOs: 704-706, SEQ ID NOs: 714-716, SEQ ID NOs: 724-726, SEQ ID NOs: 734-736, SEQ ID NOs: 744-746, SEQ ID NOs: 754-756, SEQ ID NOs: 764-766, SEQ ID NOs: 774-776, SEQ ID NOs: 784-786, SEQ ID NOs: 794-796, SEQ ID NOs: 804-806, SEQ ID NOs: 814-816, SEQ ID NOs: 824-826, SEQ ID NOs: 834-836, SEQ ID NOs: 844-846, SEQ ID NOs: 854-856, SEQ ID NOs: 864-866, SEQ ID NOs: 874-876, SEQ ID NOs: 884-886, SEQ ID NOs: 894-896, SEQ ID NOs: 904-906, SEQ ID NOs: 914-916, SEQ ID NOs: 924-926, SEQ ID NOs: 934-936, SEQ ID NOs: 944-946, SEQ ID NOs: 954-956, SEQ ID NOs: 964-966, SEQ ID NOs: 974-976, SEQ ID NOs: 984-986, particularly SEQ ID Nos: 564-566, SEQ ID Nos: 754-756, SEQ ID NOs: 724-726, and preferably SEQ ID NOs: 724-726, particularly SEQ ID Nos: 564-566, SEQ ID Nos: 754-756, SEQ ID NOs: 724-726, and preferably SEQ ID NOs: 724-726.

[0277] The present invention relates to methods for the treatment and further for the prevention, prophylaxis, or reduction of adverse events associated with immunotherapy, particularly cancer immunotherapy, more particularly a leukemia, very particularly AML, wherein the first binding domain of the antibody constructs that may be present in combination products, comprising a VH region that comprises CDR-H1, CDR-H2 and CDR-H3 selected from those depicted in: SEQ ID NOs: 341-343, SEQ ID NOs: 351-353, SEQ ID NOs: 361-363, SEQ ID NOs: 371-373, SEQ ID NOs: 381-383, SEQ ID NOs: 391-393, SEQ ID NOs: 401-403, SEQ ID NOs: 411-413, SEQ ID NOs: 421-423, SEQ ID NOs: 431-433, SEQ ID NOs: 441-443, SEQ ID NOs: 451-453, SEQ ID NOs: 461-463, SEQ ID NOs: 471-473, SEQ ID NOs: 481-483, SEQ ID NOs: 491-493, SEQ ID NOs: 501-503, SEQ ID NOs: 511-513, SEQ ID NOs: 521-523, SEQ ID NOs: 53-533, SEQ ID NOs: 541-543, SEQ ID NOs: 551-553, SEQ ID NOs: 561-563, SEQ ID NOs: 571-573, SEQ ID NOs: 581-583, SEQ ID NOs: 591-593, SEQ ID NOs: 601-603, SEQ ID NOs: 611-613, SEQ ID NOs: 621-623, SEQ ID NOs: 631-633, SEQ ID NOs: 641-643, SEQ ID NOs: 651-653, SEQ ID NOs: 661-663, SEQ ID NOs: 671-673, SEQ ID NOs: 681-683, SEQ ID NOs: 691-693, SEQ ID NOs: 701-703, SEQ ID NOs: 711-713, SEQ ID NOs: 721-723, SEQ ID NOs: 731-733, SEQ ID NOs: 741-743, SEQ ID NOs: 751-753, SEQ ID NOs: 761-763, SEQ ID NOs: 771-773, SEQ ID NOs: 781-783, SEQ ID NOs: 791-793, SEQ ID NOs: 801-803, SEQ ID NOs: 811-813, SEQ ID NOs: 821-823, SEQ ID NOs: 831-833, SEQ ID NOs: 841-843, SEQ ID NOs: 851-853, SEQ ID NOs: 861-863, SEQ ID NOs: 871-873, SEQ ID NOs: 881-883, SEQ ID NOs: 891-896, SEQ ID NOs: 901-903, SEQ ID NOs: 911-913, SEQ ID NOs: 921-923, SEQ ID NOs: 931-933, SEQ ID NOs: 941-943, SEQ ID NOs: 951-953, SEQ ID NOs: 961-963, SEQ ID NOs: 971-973, SEQ ID NOs: 981-983, particularly SEQ ID Nos: 561-563, SEQ ID Nos: 751-753, SEQ ID NOs: 721-723, and preferably SEQ ID NOs: 721-723.

[0278] The present invention relates to methods for the treatment and further for the prevention, prophylaxis, or reduction of adverse events associated with immunotherapy, particularly cancer immunotherapy, more particularly a leukemia, very particularly AML, wherein the first binding domain of the antibody constructs that may be present in combination products comprises a VL region comprising CDR-L1, CDR-L2 and CDR-L3 and a VH region comprising CDR-H1, CDR-H2 and CDR-H3 selected from the sequences in the two preceding paragraphs, particularly from the sequences selected from the group of members comprising the following six CDR sequences: 341-346, SEQ ID NOs: 351-356, SEQ ID NOs: 361-366, SEQ ID NOs: 371-376, SEQ ID NOs: 381-386, SEQ ID NOs: 391-396, SEQ ID NOs: 401-406, SEQ ID NOs: 411-416, SEQ ID NOs: 421-426, SEQ ID NOs: 431-436, SEQ ID NOs: 441-446, SEQ ID NOs: 451-456, SEQ ID NOs: 461-466, SEQ ID NOs: 471-476, SEQ ID NOs: 481-486, SEQ ID NOs: 491-496, SEQ ID NOs: 501-506, SEQ ID NOs: 511-516, SEQ ID NOs: 521-526, SEQ ID NOs: 531-536, SEQ ID NOs: 541-546, SEQ ID NOs: 551-556, SEQ ID NOs: 561-566, SEQ ID NOs: 571-576, SEQ ID NOs: 581-586, SEQ ID NOs: 591-596, SEQ ID NOs: 601-606, SEQ ID NOs: 611-616, SEQ ID NOs: 621-626, SEQ ID NOs: 631-636, SEQ ID NOs: 641-646, SEQ ID NOs: 651-656, SEQ ID NOs: 661-666, SEQ ID NOs: 671-676, SEQ ID NOs: 681-686, SEQ ID NOs: 691-696, SEQ ID NOs: 701-706, SEQ ID NOs: 711-716, SEQ ID NOs: 721-726, SEQ ID NOs: 731-736, SEQ ID NOs: 741-746, SEQ ID NOs: 751-756, SEQ ID NOs: 761-766, SEQ ID NOs: 771-776, SEQ ID NOs: 781-786, SEQ ID NOs: 791-796, SEQ ID NOs: 801-806, SEQ ID NOs: 811-816, SEQ ID NOs: 821-826, SEQ ID NOs: 831-836, SEQ ID NOs: 841-846, SEQ ID NOs: 851-856, SEQ ID NOs: 861-866, SEQ ID NOs: 871-876, SEQ ID NOs: 881-886, SEQ ID NOs: 891-896, SEQ ID NOs: 901-906, SEQ ID NOs: 911-916, SEQ ID NOs: 921-926, SEQ ID NOs: 931-936, SEQ ID NOs: 941-946, SEQ ID NOs: 951-956, SEQ ID NOs: 961-966, SEQ ID NOs: 971-976, SEQ ID NOs: 981-986, particularly SEQ ID Nos: 561-566, SEQ ID Nos: 751-756, SEQ ID NOs: 721-726, and preferably SEQ ID NOs: 721-726.

[0279] It is also envisaged for the antibody constructs used in methods according to the present invention that the domain, which selectively binds to an epitope of FLT3, competes with those explicitly recited herein, i.e. those characterized by specific SEQ ID Nos.

[0280] Whether or not an antibody construct binds to the same epitope of FLT3 as another given antibody construct can be measured e.g. by epitope mapping with chimeric or truncated target molecules, e.g. as described herein above and in the Examples in WO2017021362.

[0281] Further, whether an antibody construct competes for binding with another given antibody construct can be measured in a competition assay such as a competitive ELISA or a cell-based competition assay. Avidin-coupled microparticles (beads) can also be used. Like an avidin-coated ELISA plate, when reacted with a biotinylated protein, each of these beads can be used as a substrate on which an assay can be performed. Antigen is coated onto a bead and then precoated with the first antibody. The second antibody is added, and any additional binding is determined. Possible means for the read-out includes flow cytometry.

[0282] A preferred antibody construct used in methods according to the invention can also be defined as a antibody construct comprising a first (preferably human) binding domain which binds to human FLT3 on the surface of a target cell and a second binding domain which binds to CD3, preferably human CD3, wherein the first binding domain competes for binding with an antibody selected from the group consisting of FL-1 to FL-65 as disclosed in WO2017021362, i.e., an antibody comprising a VH region comprising CDR-H1, CDR-H2 and CDR-H3 and a VL region comprising CDR-L1, CDR-L2 and CDR-L3 selected from the group consisting of those described above.

[0283] The present invention relates to methods for the treatment and further for the prevention, prophylaxis, or reduction of adverse events associated with immunotherapy, particularly cancer immunotherapy, more particularly a leukemia, very particularly AML, wherein the first binding domain of the antibody constructs that may be present in combination products, comprise a domain bind to FLT3 comprising a VL region selected from the group of VL regions as depicted in any one of SEQ ID NO: 348, SEQ ID NO: 358, SEQ ID NO: 368, SEQ ID NO: 378, SEQ ID NO: 388, SEQ ID NO: 398, SEQ ID NO: 407+408, SEQ ID NO: 418, SEQ ID NO: 428, SEQ ID NO: 438, SEQ ID NO: 448, SEQ ID NO: 458, SEQ ID NO: 468, SEQ ID NO: 478, SEQ ID NO: 488, SEQ ID NO: 498, SEQ ID NO: 508, SEQ ID NO: 518, SEQ ID NO: 528, SEQ ID NO: 538, SEQ ID NO: 548, SEQ ID NO: 558, SEQ ID NO: 568, SEQ ID NO: 578, SEQ ID NO: 588, SEQ ID NO: 598, SEQ ID NO: 608, SEQ ID NO: 618, SEQ ID NO: 628, SEQ ID NO: 638, SEQ ID NO: 648, SEQ ID NO: 658, SEQ ID NO: 668, SEQ ID NO: 678, SEQ ID NO: 688, SEQ ID NO: 698, SEQ ID NO: 708, SEQ ID NO: 718, SEQ ID NO: 728, SEQ ID NO: 738, SEQ ID NO: 748, SEQ ID NO: 758, SEQ ID NO: 768, SEQ ID NO: 778, SEQ ID NO: 788, SEQ ID NO: 798, SEQ ID NO: 808, SEQ ID NO: 818, SEQ ID NO: 828, SEQ ID NO: 838, SEQ ID NO: 848, SEQ ID NO: 858, SEQ ID NO: 868, SEQ ID NO: 878, SEQ ID NO: 888, SEQ ID NO: 898, SEQ ID NO: 908, SEQ ID NO: 918, SEQ ID NO: 928, SEQ ID NO: 938, SEQ ID NO: 948, SEQ ID NO: 958, SEQ ID NO: 968, SEQ ID NO: 978, particularly SEQ ID Nos: 728, 568, 758, preferably SEQ ID NO: 728.

[0284] The present invention relates to methods for the treatment and further for the prevention, prophylaxis, or reduction of adverse events associated with immunotherapy, particularly cancer immunotherapy, more particularly a leukemia, very particularly AML, wherein the first binding domain of the antibody constructs that may be present in combination products, binds to FLT3 and comprises a VH region selected from the group of VH regions as depicted in any one of SEQ ID NO: 347, SEQ ID NO: 357, SEQ ID NO: 367, SEQ ID NO: 377, SEQ ID NO: 387, SEQ ID NO: 397, SEQ ID NO: 407, SEQ ID NO: 417, SEQ ID NO: 427, SEQ ID NO: 437, SEQ ID NO: 447, SEQ ID NO: 457, SEQ ID NO: 467, SEQ ID NO: 477, SEQ ID NO: 487, SEQ ID NO: 497, SEQ ID NO: 507, SEQ ID NO: 517, SEQ ID NO: 527, SEQ ID NO: 537, SEQ ID NO: 547, SEQ ID NO: 557, SEQ ID NO: 567, SEQ ID NO: 577, SEQ ID NO: 587, SEQ ID NO: 597, SEQ ID NO: 607, SEQ ID NO: 617, SEQ ID NO: 627, SEQ ID NO: 637, SEQ ID NO: 647, SEQ ID NO: 657, SEQ ID NO: 667, SEQ ID NO: 677, SEQ ID NO: 687, SEQ ID NO: 697, SEQ ID NO: 707, SEQ ID NO: 717, SEQ ID NO: 727, SEQ ID NO: 737, SEQ ID NO: 747, SEQ ID NO: 757, SEQ ID NO: 767, SEQ ID NO: 777, SEQ ID NO: 787, SEQ ID NO: 797, SEQ ID NO: 807, SEQ ID NO: 817, SEQ ID NO: 827, SEQ ID NO: 837, SEQ ID NO: 847, SEQ ID NO: 857, SEQ ID NO: 867, SEQ ID NO: 877, SEQ ID NO: 887, SEQ ID NO: 897, SEQ ID NO: 907, SEQ ID NO: 917, SEQ ID NO: 927, SEQ ID NO: 937, SEQ ID NO: 947, SEQ ID NO: 957, SEQ ID NO: 967, SEQ ID NO: 977, particularly SEQ ID Nos: 727, 767, 757, preferably SEQ ID NO: 727.

[0285] The present invention relates to methods for the treatment and further for the prevention, prophylaxis, or reduction of adverse events associated with immunotherapy, particularly cancer immunotherapy, more particularly a leukemia, very particularly AML, wherein the first binding domain of the antibody constructs that may be present in form of combination products, binds to FLT3 and comprises pairs of a VH region and a VL region selected from the group of pairs as depicted in SEQ ID NO: 347+348, SEQ ID NO: 357+358, SEQ ID NO: 367+368, SEQ ID NO: 377+378, SEQ ID NO: 387+388, SEQ ID NO: 397+398, SEQ ID NO: 407+408, SEQ ID NO: 417+418, SEQ ID NO: 427+428, SEQ ID NO: 437+438, SEQ ID NO: 447+448, SEQ ID NO: 457+458, SEQ ID NO: 467+468, SEQ ID NO: 477+478, SEQ ID NO: 487+488, SEQ ID NO: 497+498, SEQ ID NO: 507+508, SEQ ID NO: 517+518, SEQ ID NO: 527+528, SEQ ID NO: 537+538, SEQ ID NO: 547+548, SEQ ID NO: 557+558, SEQ ID NO: 567+568, SEQ ID NO: 577+578, SEQ ID NO: 587+588, SEQ ID NO: 597+598, SEQ ID NO: 607+608, SEQ ID NO: 617+618, SEQ ID NO: 627+628, SEQ ID NO: 637+638, SEQ ID NO: 647+648, SEQ ID NO: 657+658, SEQ ID NO: 667+668, SEQ ID NO: 677+678, SEQ ID NO: 687+688, SEQ ID NO: 697+698, SEQ ID NO: 707+708, SEQ ID NO: 717+718, SEQ ID NO: 727+728, SEQ ID NO: 737+738, SEQ ID NO: 747+748, SEQ ID NO: 757+758, SEQ ID NO: 767+768, SEQ ID NO: 777+778, SEQ ID NO: 787+788, SEQ ID NO: 797+798, SEQ ID NO: 807+808, SEQ ID NO: 817+818, SEQ ID NO: 827+828, SEQ ID NO: 837+838, SEQ ID NO: 847+848, SEQ ID NO: 857+858, SEQ ID NO: 867+868, SEQ ID NO: 877+878, SEQ ID NO: 887+888, SEQ ID NO: 897+898, SEQ ID NO: 907+908, SEQ ID NO: 917+918, SEQ ID NO: 927+928, SEQ ID NO: 937+938, SEQ ID NO: 947+948, SEQ ID NO: 957+958, SEQ ID NO: 967+968, SEQ ID NO: 977+978, and SEQ ID NO: 987+988, particularly SEQ ID Nos: 727+728, 767+568, 757+758, preferably SEQ ID NO: 727+728.

[0286] The present invention relates to methods for the treatment and further for the prevention, prophylaxis, or reduction of adverse events associated with immunotherapy, particularly cancer immunotherapy, more particularly a leukemia, very particularly AML, wherein the first binding domain of the antibody constructs that may be present in combination products binds to FLT3 and comprises a polypeptide selected from the group consisting of those depicted in SEQ ID NO: 349, SEQ ID NO: 359, SEQ ID NO: 369, SEQ ID NO: 379, SEQ ID NO: 389, SEQ ID NO: 399, SEQ ID NO: 409, SEQ ID NO: 419, SEQ ID NO: 429, SEQ ID NO: 439, SEQ ID NO: 449, SEQ ID NO: 459, SEQ ID NO: 469, SEQ ID NO: 479, SEQ ID NO: 489, SEQ ID NO: 499, SEQ ID NO: 509, SEQ ID NO: 519, SEQ ID NO: 529, SEQ ID NO: 539, SEQ ID NO: 549, SEQ ID NO: 559, SEQ ID NO: 569, SEQ ID NO: 579, SEQ ID NO: 589, SEQ ID NO: 599, SEQ ID NO: 609, SEQ ID NO: 619, SEQ ID NO: 629, SEQ ID NO: 639, SEQ ID NO: 649, SEQ ID NO: 659, SEQ ID NO: 669, SEQ ID NO: 679, SEQ ID NO: 689, SEQ ID NO: 699, SEQ ID NO: 709, SEQ ID NO: 719, SEQ ID NO: 729, SEQ ID NO: 739, SEQ ID NO: 749, SEQ ID NO: 759, SEQ ID NO: 769, SEQ ID NO: 779, SEQ ID NO: 789, SEQ ID NO: 799, SEQ ID NO: 809, SEQ ID NO: 819, SEQ ID NO: 829, SEQ ID NO: 839, SEQ ID NO: 849, SEQ ID NO: 859, SEQ ID NO: 869, SEQ ID NO: 879, SEQ ID NO: 889, SEQ ID NO: 899, SEQ ID NO: 909, SEQ ID NO: 919, SEQ ID NO: 929, SEQ ID NO: 939, SEQ ID NO: 949, SEQ ID NO: 959, SEQ ID NO: 969, SEQ ID NO: 979, and SEQ ID NO: 989 particularly SEQ ID NOS: 729, 759, 569, preferably SEQ ID NO: 729.

[0287] Accordingly, the antibody construct, which may be used in methods or which is used in accordance with the present invention, binds to CD3 and FLT3 and may be selected, for example, from the group comprising SEQ ID Nos: 350, 360, 370, 380, 390, 400, 410, 420, 430, 440, 450, 460, 470, 480, 490, 500, 510, 520, 530, 540, 550, 560, 570, 580, 590, 600, 610, 620, 630, 640, 650, 660, 670, 680, 690, 700, 710, 720, 730, 740, 750, 760, 770, 780, 790, 800, 810, 820, 830, 840, 850, 860, 870, 880, 890, 900, 910, 920, 930, 940, 950, 960, 970, 980, and 990.

[0288] The above binding domains (which are specified by their CDRs, VH region and VL region and combinations thereof) may also be characterized as binding domains that bind to an epitope of FLT3 which is comprised within the region as depicted in SEQ ID NO: 991 as disclosed in WO2017021362.

[0289] The antibody constructs binding to FLT3 as disclosed above are thus intended for use in methods for the treatment and further for the prevention, prophylaxis, treatment or amelioration of a hematological cancer disease or a metastatic cancer disease, particularly of AML or a metastatic cancer disease derived from AML, and are part of combination products, kits, etc., and/or may be used in or administered in steps of the methods according to the present invention, i.e. together with an inhibitor/antagonist of TNF/TNFR that reduces TNF/TNFR signaling, wherein said inhibitor/antagonist of TNF/TNFR that reduces TNF/TNFR signaling (b) is administered to a patient in need thereof prior to administration of said antibody construct (a), and wherein said inhibitor/antagonist is administered to prevent or reduce cytokine release syndrome (CRS) or other adverse effects associated with administration of a CD3-binding construct as disclosed throughout the present invention and as set out below.

(i) A method for the treatment and further for the prevention, prophylaxis, amelioraton or reduction of adverse events associated with immunotherapy, particularly cancer immunotherapy, more particularly AML therapy, with an antibody construct comprising at least one domain (also referred to as “first domain”) which binds to a target antigen on the surface of a target cell, and at least one other domain (also referred to as “second domain”) which binds to CD3, preferably human CD3, on the surface of a T cell according to any one of embodiments (i) to (xiv) of general Aspect A) and the preceding information in Sub-Aspect B-2, comprising
[0290] (a) at least one antibody construct referred to in the preamble, and
[0291] (b) an inhibitor/antagonist of TNF/TNFR that reduces TNF/TNFR signaling,
   wherein said inhibitor/antagonist of TNF/TNFR that reduces TNF/TNFR signaling referred to in (b) is for administration to a patient prior to and optionally also following administration of said antibody construct referred to in (a), wherein the first domain binds selectively to human FLT3 (SEQ ID NO: 989).
   (ii) A method for the treatment and further for the prevention, prophylaxis, amelioraton or reduction of adverse events associated with immunotherapy, particularly cancer immunotherapy, more particularly AML therapy, with an antibody construct comprising at least one domain which binds to FLT3 on the surface of a target cell, and at least one other domain which binds to CD3, preferably human CD3, on the surface of a T cell according to any one of embodiments (i) to (xiv) of general Aspect A) and embodiment (i) of Sub-Aspect B-3, comprising
[0292] (a) at least one antibody construct referred to in the preamble, and
[0293] (b) an inhibitor/antagonist of TNF/TNFR that reduces TNF/TNFR signaling,
   wherein said inhibitor/antagonist of TNF/TNFR that reduces TNF/TNFR signaling referred to in (b) is for administration to a patient prior to and optionally also following administration of said antibody construct referred to in (a), wherein said antibody construct binds to an epitope that is selectively bound by an antibody/antibody construct that comprises the following CDRs of the VH chain and/or VL chain respectively, wherein the CDRs are selected from the group comprising the VH-CDR1, VH-CDR2, VH-CDR3, VL-CDR1, VL-CDR2, and VL-CDR3 regions depicted in SEQ ID Nos: SEQ ID NOs: 341-346, SEQ ID NOs: 351-356, SEQ ID NOs: 361-366, SEQ ID NOs: 371-376, SEQ ID NOs: 381-386, SEQ ID NOs: 391-396, SEQ ID NOs: 401-406, SEQ ID NOs: 411-416, SEQ ID NOs: 421-426, SEQ ID NOs: 431-436, SEQ ID NOs: 441-446, SEQ ID NOs: 451-456, SEQ ID NOs: 461-466, SEQ ID NOs: 471-476, SEQ ID NOs: 481-486, SEQ ID NOs: 491-496, SEQ ID NOs: 501-506, SEQ ID NOs: 511-516, SEQ ID NOs: 521-526, SEQ ID NOs: 531-536, SEQ ID NOs: 541-546, SEQ ID NOs: 551-556, SEQ ID NOs: 561-566, SEQ ID NOs: 571-576, SEQ ID NOs: 581-586, SEQ ID NOs: 591-596, SEQ ID NOs: 601-606, SEQ ID NOs: 611-616, SEQ ID NOs: 621-626, SEQ ID NOs: 631-636, SEQ ID NOs: 641-646, SEQ ID NOs: 651-656, SEQ ID NOs: 661-666, SEQ ID NOs: 671-676, SEQ ID NOs: 681-686, SEQ ID NOs: 691-696, SEQ ID NOs: 701-706, SEQ ID NOs: 711-716, SEQ ID NOs: 721-726, SEQ ID NOs: 731-736, SEQ ID NOs: 741-746, SEQ ID NOs: 751-756, SEQ ID NOs: 761-766, SEQ ID NOs: 771-776, SEQ ID NOs: 781-786, SEQ ID NOs: 791-796, SEQ ID NOs: 801-806, SEQ ID NOs: 811-816, SEQ ID NOs: 821-826, SEQ ID NOs: 831-836, SEQ ID NOs: 841-846, SEQ ID NOs: 851-856, SEQ ID NOs: 861-866, SEQ ID NOs: 871-876, SEQ ID NOs: 881-886, SEQ ID NOs: 891-896, SEQ ID NOs: 901-906, SEQ ID NOs: 911-916, SEQ ID NOs: 921-926, SEQ ID NOs: 931-936, SEQ ID NOs: 941-946, SEQ ID NOs: 951-956, SEQ ID NOs: 961-966, SEQ ID NOs: 971-976, SEQ ID NOs: 981-986, particularly SEQ ID Nos: 561-566, SEQ ID Nos: 751-756, SEQ ID NOs: 721-726, and preferably SEQ ID NOs: 721-726.
   (iii) A method for the treatment and further for the prevention, prophylaxis, amelioraton or reduction of adverse events associated with immunotherapy, particularly cancer immunotherapy, more particularly AML therapy, with an antibody construct comprising at least one domain which binds to FLT3 on the surface of a target cell, and at least one other domain which binds to CD3, preferably human CD3, on the surface of a T cell according to any one of embodiments (i) to (xvi) of general Aspect A) and embodiments (i) or (ii) of Sub-Aspect B-3, comprising
[0294] (a) at least one antibody construct referred to in the preamble, and
[0295] (b) an inhibitor/antagonist of TNF/TNFR that reduces TNF/TNFR signaling,
   wherein said inhibitor/antagonist of TNF/TNFR that reduces TNF/TNFR signaling referred to in (b) is for administration to a patient prior to and optionally also following administration of said antibody construct referred to in (a), wherein said antibody construct comprises the following CDRs of the VH chain and/or VL chain respectively, wherein the CDRs are selected from the group comprising the VH-CDR1, VH-CDR2, VH-CDR3, VL-CDR1, VL-CDR2, and VL-CDR3 regions depicted in SEQ ID Nos: SEQ ID NOs: 341-346, SEQ ID NOs: 351-356, SEQ ID NOs: 361-366, SEQ ID NOs: 371-376, SEQ ID NOs: 381-386, SEQ ID NOs: 391-396, SEQ ID NOs: 401-406, SEQ ID NOs: 411-416, SEQ ID NOs: 421-426, SEQ ID NOs: 431-436, SEQ ID NOs: 441-446, SEQ ID NOs: 451-456, SEQ ID NOs: 461-466, SEQ ID NOs: 471-476, SEQ ID NOs: 481-486, SEQ ID NOs: 491-496, SEQ ID NOs: 501-506, SEQ ID NOs: 511-516, SEQ ID NOs: 521-526, SEQ ID NOs: 531-536, SEQ ID NOs: 541-546, SEQ ID NOs: 551-556, SEQ ID NOs: 561-566, SEQ ID NOs: 571-576, SEQ ID NOs: 581-586, SEQ ID NOs: 591-596, SEQ ID NOs: 601-606, SEQ ID NOs: 611-616, SEQ ID NOs: 621-626, SEQ ID NOs: 631-636, SEQ ID NOs: 641-646, SEQ ID NOs: 651-656, SEQ ID NOs: 661-666, SEQ ID NOs: 671-676, SEQ ID NOs: 681-686, SEQ ID NOs: 691-696, SEQ ID NOs: 701-706, SEQ ID NOs: 711-716, SEQ ID NOs: 721-726, SEQ ID NOs: 731-736, SEQ ID NOs: 741-746, SEQ ID NOs: 751-756, SEQ ID NOs: 761-766, SEQ ID NOs: 771-776, SEQ ID NOs: 781-786, SEQ ID NOs: 791-796, SEQ ID NOs: 801-806, SEQ ID NOs: 811-816, SEQ ID NOs: 821-826, SEQ ID NOs: 831-836, SEQ ID NOs: 841-846, SEQ ID NOs: 851-856, SEQ ID NOs: 861-866, SEQ ID NOs: 871-876, SEQ ID NOs: 881-886, SEQ ID NOs: 891-896, SEQ ID NOs: 901-906, SEQ ID NOs: 911-916, SEQ ID NOs: 921-926, SEQ ID NOs: 931-936, SEQ ID NOs: 941-946, SEQ ID NOs: 951-956, SEQ ID NOs: 961-966, SEQ ID NOs: 971-976, SEQ ID NOs: 981-986, particularly SEQ ID Nos: 561-566, SEQ ID Nos: 751-756, SEQ ID NOs: 721-726, and preferably SEQ ID NOs: 721-726.
   (iv) A method for the treatment and further for the prevention, prophylaxis, amelioraton or reduction of adverse events associated with immunotherapy, particularly cancer immunotherapy, more particularly AML therapy, with an antibody construct comprising at least one domain which binds to FLT3 on the surface of a target cell, and at least one other domain which binds to CD3, preferably human CD3, on the surface of a T cell according to any one of embodiments (i) to (xvi) of general Aspect A) and embodiments (i) to (iii) of Sub-Aspect B-3, comprising
[0296] (a) at least one antibody construct referred to in the preamble, and
[0297] (b) an inhibitor/antagonist of TNF/TNFR that reduces TNF/TNFR signaling,
   wherein said inhibitor/antagonist of TNF/TNFR that reduces TNF/TNFR signaling referred to in (b) is for administration to a patient prior to and optionally also following administration of said antibody construct referred to in (a), wherein said antibody construct binds to an epitope that is selectively bound by an antibody/antibody construct that comprises the following CDRs of the VH chain and/or VL chain respectively, wherein the CDRs are selected from the group comprising the VH-CDR1, VH-CDR2, VH-CDR3, VL-CDR1, VL-CDR2, and VL-CDR3 regions depicted in SEQ ID Nos: SEQ ID NOs: 341-346, SEQ ID NOs: 351-356, SEQ ID NOs: 361-366, SEQ ID NOs: 371-376, SEQ ID NOs: 381-386, SEQ ID NOs: 391-396, SEQ ID NOs: 401-406, SEQ ID NOs: 411-416, SEQ ID NOs: 421-426, SEQ ID NOs: 431-436, SEQ ID NOs: 441-446, SEQ ID NOs: 451-456, SEQ ID NOs: 461-466, SEQ ID NOs: 471-476, SEQ ID NOs: 481-486, SEQ ID NOs: 491-496, SEQ ID NOs: 501-506, SEQ ID NOs: 511-516, SEQ ID NOs: 521-526, SEQ ID NOs: 531-536, SEQ ID NOs: 541-546, SEQ ID NOs: 551-556, SEQ ID NOs: 561-566, SEQ ID NOs: 571-576, SEQ ID NOs: 581-586, SEQ ID NOs: 591-596, SEQ ID NOs: 601-606, SEQ ID NOs: 611-616, SEQ ID NOs: 621-626, SEQ ID NOs: 631-636, SEQ ID NOs: 641-646, SEQ ID NOs: 651-656, SEQ ID NOs: 661-666, SEQ ID NOs: 671-676, SEQ ID NOs: 681-686, SEQ ID NOs: 691-696, SEQ ID NOs: 701-706, SEQ ID NOs: 711-716, SEQ ID NOs: 721-726, SEQ ID NOs: 731-736, SEQ ID NOs: 741-746, SEQ ID NOs: 751-756, SEQ ID NOs: 761-766, SEQ ID NOs: 771-776, SEQ ID NOs: 781-786, SEQ ID NOs: 791-796, SEQ ID NOs: 801-806, SEQ ID NOs: 811-816, SEQ ID NOs: 821-826, SEQ ID NOs: 831-836, SEQ ID NOs: 841-846, SEQ ID NOs: 851-856, SEQ ID NOs: 861-866, SEQ ID NOs: 871-876, SEQ ID NOs: 881-886, SEQ ID NOs: 891-896, SEQ ID NOs: 901-906, SEQ ID NOs: 911-916, SEQ ID NOs: 921-926, SEQ ID NOs: 931-936, SEQ ID NOs: 941-946, SEQ ID NOs: 951-956, SEQ ID NOs: 961-966, SEQ ID NOs: 971-976, SEQ ID NOs: 981-986, particularly SEQ ID Nos: 561-566, SEQ ID Nos: 751-756, SEQ ID NOs: 721-726, and preferably SEQ ID NOs: 721-726.
   (v) A method for the treatment and further for the prevention, prophylaxis, amelioraton or reduction of adverse events associated with immunotherapy, particularly cancer immunotherapy, more particularly AML therapy, with an antibody construct comprising at least one domain which binds to FLT3 on the surface of a target cell, and at least one other domain which binds to CD3, preferably human CD3, on the surface of a T cell according to any one of embodiments (i) to (xvi) of general Aspect A) and embodiments (i) to (iv) of Sub-Aspect B-3, comprising
[0298] (a) at least one antibody construct referred to in the preamble, and
[0299] (b) an inhibitor/antagonist of TNF/TNFR that reduces TNF/TNFR signaling,
   wherein said inhibitor/antagonist of TNF/TNFR that reduces TNF/TNFR signaling referred to in (b) is for administration to a patient prior to and optionally also following administration of said antibody construct referred to in (a), wherein said antibody construct comprises the following CDRs of the VH chain and/or VL chain respectively, wherein the CDRs are selected from the group comprising the VH-CDR1, VH-CDR2, VH-CDR3, VL-CDR1, VL-CDR2, and VL-CDR3 regions depicted in SEQ ID Nos: SEQ ID NOs: 341-346, SEQ ID NOs: 351-356, SEQ ID NOs: 361-366, SEQ ID NOs: 371-376, SEQ ID NOs: 381-386, SEQ ID NOs: 391-396, SEQ ID NOs: 401-406, SEQ ID NOs: 411-416, SEQ ID NOs: 421-426, SEQ ID NOs: 431-436, SEQ ID NOs: 441-446, SEQ ID NOs: 451-456, SEQ ID NOs: 461-466, SEQ ID NOs: 471-476, SEQ ID NOs: 481-486, SEQ ID NOs: 491-496, SEQ ID NOs: 501-506, SEQ ID NOs: 511-516, SEQ ID NOs: 521-526, SEQ ID NOs: 531-536, SEQ ID NOs: 541-546, SEQ ID NOs: 551-556, SEQ ID NOs: 561-566, SEQ ID NOs: 571-576, SEQ ID NOs: 581-586, SEQ ID NOs: 591-596, SEQ ID NOs: 601-606, SEQ ID NOs: 611-616, SEQ ID NOs: 621-626, SEQ ID NOs: 631-636, SEQ ID NOs: 641-646, SEQ ID NOs: 651-656, SEQ ID NOs: 661-666, SEQ ID NOs: 671-676, SEQ ID NOs: 681-686, SEQ ID NOs: 691-696, SEQ ID NOs: 701-706, SEQ ID NOs: 711-716, SEQ ID NOs: 721-726, SEQ ID NOs: 731-736, SEQ ID NOs: 741-746, SEQ ID NOs: 751-756, SEQ ID NOs: 761-766, SEQ ID NOs: 771-776, SEQ ID NOs: 781-786, SEQ ID NOs: 791-796, SEQ ID NOs: 801-806, SEQ ID NOs: 811-816, SEQ ID NOs: 821-826, SEQ ID NOs: 831-836, SEQ ID NOs: 841-846, SEQ ID NOs: 851-856, SEQ ID NOs: 861-866, SEQ ID NOs: 871-876, SEQ ID NOs: 881-886, SEQ ID NOs: 891-896, SEQ ID NOs: 901-906, SEQ ID NOs: 911-916, SEQ ID NOs: 921-926, SEQ ID NOs: 931-936, SEQ ID NOs: 941-946, SEQ ID NOs: 951-956, SEQ ID NOs: 961-966, SEQ ID NOs: 971-976, SEQ ID NOs: 981-986, particularly SEQ ID Nos: 561-566, SEQ ID Nos: 751-756, SEQ ID NOs: 721-726, and preferably SEQ ID NOs: 721-726.
   (vi) A method for the treatment and further for the prevention, prophylaxis, amelioraton or reduction of adverse events associated with immunotherapy, particularly cancer immunotherapy, more particularly AML therapy, with an antibody construct comprising at least one domain which binds to FLT3 on the surface of a target cell, and at least one other domain which binds to CD3, preferably human CD3, on the surface of a T cell according to any one of embodiments (i) to (xvi) of general Aspect A) and embodiments (i) to (v) of Sub-Aspect B-3, comprising
[0300] (a) at least one antibody construct referred to in the preamble, and
[0301] (b) an inhibitor/antagonist of TNF/TNFR that reduces TNF/TNFR signaling,
   wherein said inhibitor/antagonist of TNF/TNFR that reduces TNF/TNFR signaling referred to in (b) is for administration to a patient prior to and optionally also following administration of said antibody construct referred to in (a), wherein the domain which binds to FLT3 comprises a VL region comprising CDR-L1, CDR-L2 and CDR-L3 selected from those depicted in: SEQ ID NOs: 344-346, SEQ ID NOs: 354-356, SEQ ID NOs: 364-366, SEQ ID NOs: 374-376, SEQ ID NOs: 384-386, SEQ ID NOs: 394-396, SEQ ID NOs: 404-406, SEQ ID NOs: 414-416, SEQ ID NOs: 424-426, SEQ ID NOs: 434-436, SEQ ID NOs: 444-446, SEQ ID NOs: 454-456, SEQ ID NOs: 464-466, SEQ ID NOs: 474-476, SEQ ID NOs: 484-486, SEQ ID NOs: 494-496, SEQ ID NOs: 504-506, SEQ ID NOs: 514-516, SEQ ID NOs: 524-526, SEQ ID NOs: 534-536, SEQ ID NOs: 544-546, SEQ ID NOs: 554-556, SEQ ID NOs: 564-566, SEQ ID NOs: 574-576, SEQ ID NOs: 584-586, SEQ ID NOs: 594-596, SEQ ID NOs: 604-606, SEQ ID NOs: 614-616, SEQ ID NOs: 624-626, SEQ ID NOs: 634-636, SEQ ID NOs: 644-646, SEQ ID NOs: 654-656, SEQ ID NOs: 664-666, SEQ ID NOs: 674-676, SEQ ID NOs: 684-686, SEQ ID NOs: 694-696, SEQ ID NOs: 704-706, SEQ ID NOs: 714-716, SEQ ID NOs: 724-726, SEQ ID NOs: 734-736, SEQ ID NOs: 744-746, SEQ ID NOs: 754-756, SEQ ID NOs: 764-766, SEQ ID NOs: 774-776, SEQ ID NOs: 784-786, SEQ ID NOs: 794-796, SEQ ID NOs: 804-806, SEQ ID NOs: 814-816, SEQ ID NOs: 824-826, SEQ ID NOs: 834-836, SEQ ID NOs: 844-846, SEQ ID NOs: 854-856, SEQ ID NOs: 864-866, SEQ ID NOs: 874-876, SEQ ID NOs: 884-886, SEQ ID NOs: 894-896, SEQ ID NOs: 904-906, SEQ ID NOs: 914-916, SEQ ID NOs: 924-926, SEQ ID NOs: 934-936, SEQ ID NOs: 944-946, SEQ ID NOs: 954-956, SEQ ID NOs: 964-966, SEQ ID NOs: 974-976, SEQ ID NOs: 984-986, particularly SEQ ID Nos: 564-566, SEQ ID Nos: 754-756, SEQ ID NOs: 724-726, and preferably SEQ ID NOs: 724-726.
   (vii) A method for the treatment and further for the prevention, prophylaxis, amelioraton or reduction of adverse events associated with immunotherapy, particularly cancer immunotherapy, more particularly AML therapy, with an antibody construct comprising at least one domain which binds to FLT3 on the surface of a target cell, and at least one other domain which binds to CD3, preferably human CD3, on the surface of a T cell according to any one of embodiments (i) to (xvi) of general Aspect A) and embodiments (i) to (vi) of Sub-Aspect B-3, comprising
[0302] (a) at least one antibody construct referred to in the preamble, and
[0303] (b) an inhibitor/antagonist of TNF/TNFR that reduces TNF/TNFR signaling,
   wherein said inhibitor/antagonist of TNF/TNFR that reduces TNF/TNFR signaling referred to in (b) is for administration to a patient prior to and optionally also following administration of said antibody construct referred to in (a), wherein the domain which binds to FLT3 comprises a VH region comprising CDR-H1, CDR-H2 and CDR-H3 selected from those depicted in: SEQ ID NOs: 341-343; SEQ ID NOs: 351-353, SEQ ID NOs: 361-363, SEQ ID NOs: 371-373, SEQ ID NOs: 381-383, SEQ ID NOs: 391-393, SEQ ID NOs: 401-403, SEQ ID NOs: 411-413, SEQ ID NOs: 421-423, SEQ ID NOs: 431-433, SEQ ID NOs: 441-443, SEQ ID NOs: 451-453, SEQ ID NOs: 461-463, SEQ ID NOs: 471-473, SEQ ID NOs: 481-483, SEQ ID NOs: 491-493, SEQ ID NOs: 501-503, SEQ ID NOs: 511-513, SEQ ID NOs: 521-523, SEQ ID NOs: 531-533, SEQ ID NOs: 541-543, SEQ ID NOs: 551-553, SEQ ID NOs: 561-563, SEQ ID NOs: 571-573, SEQ ID NOs: 581-583, SEQ ID NOs: 591-593, SEQ ID NOs: 601-603, SEQ ID NOs: 611-613, SEQ ID NOs: 621-623, SEQ ID NOs: 631-633, SEQ ID NOs: 641-643, SEQ ID NOs: 651-653, SEQ ID NOs: 661-663, SEQ ID NOs: 671-673, SEQ ID NOs: 681-683, SEQ ID NOs: 691-693, SEQ ID NOs: 701-703, SEQ ID NOs: 711-713, SEQ ID NOs: 721-723, SEQ ID NOs: 731-733, SEQ ID NOs: 741-743, SEQ ID NOs: 751-753, SEQ ID NOs: 761-763, SEQ ID NOs: 771-773, SEQ ID NOs: 781-783, SEQ ID NOs: 791-793, SEQ ID NOs: 801-803, SEQ ID NOs: 811-813, SEQ ID NOs: 821-823, SEQ ID NOs: 831-833, SEQ ID NOs: 841-843, SEQ ID NOs: 851-853, SEQ ID NOs: 861-863, SEQ ID NOs: 871-873, SEQ ID NOs: 881-883, SEQ ID NOs: 891-896, SEQ ID NOs: 901-903, SEQ ID NOs: 911-913, SEQ ID NOs: 921-923, SEQ ID NOs: 931-933, SEQ ID NOs: 941-943, SEQ ID NOs: 951-953, SEQ ID NOs: 961-963, SEQ ID NOs: 971-973, SEQ ID NOs: 981-983, particularly SEQ ID Nos: 561-563, SEQ ID Nos: 751-753, SEQ ID NOs: 721-723, and preferably SEQ ID NOs: 721-723.
   (viii) A method for the treatment and further for the prevention, prophylaxis, amelioraton or reduction of adverse events associated with immunotherapy, particularly cancer immunotherapy, more particularly AML therapy, with an antibody construct comprising at least one domain which binds to FLT3 on the surface of a target cell, and at least one other domain which binds to CD3, preferably human CD3, on the surface of a T cell according to any one of embodiments (i) to (xvi) of general Aspect A) and embodiments (i) to (vii) of Sub-Aspect B-3, comprising
[0304] (a) at least one antibody construct referred to in the preamble, and
[0305] (b) an inhibitor/antagonist of TNF/TNFR that reduces TNF/TNFR signaling,
   wherein said inhibitor/antagonist of TNF/TNFR that reduces TNF/TNFR signaling referred to in (b) is for administration to a patient prior to and optionally also following administration of said antibody construct referred to in (a), wherein the domain which binds to FLT3 comprises a VL region selected from the group of VL regions as depicted in any one of SEQ ID NO: 348, SEQ ID NO: 358, SEQ ID NO: 368, SEQ ID NO: 378, SEQ ID NO: 388, SEQ ID NO: 398, SEQ ID NO: 407+408, SEQ ID NO: 418, SEQ ID NO: 428, SEQ ID NO: 438, SEQ ID NO: 448, SEQ ID NO: 458, SEQ ID NO: 468, SEQ ID NO: 478, SEQ ID NO: 488, SEQ ID NO: 498, SEQ ID NO: 508, SEQ ID NO: 518, SEQ ID NO: 528, SEQ ID NO: 538, SEQ ID NO: 548, SEQ ID NO: 558, SEQ ID NO: 568, SEQ ID NO: 578, SEQ ID NO: 588, SEQ ID NO: 598, SEQ ID NO: 608, SEQ ID NO: 618, SEQ ID NO: 628, SEQ ID NO: 638, SEQ ID NO: 648, SEQ ID NO: 658, SEQ ID NO: 668, SEQ ID NO: 678, SEQ ID NO: 688, SEQ ID NO: 698, SEQ ID NO: 708, SEQ ID NO: 718, SEQ ID NO: 728, SEQ ID NO: 738, SEQ ID NO: 748, SEQ ID NO: 758, SEQ ID NO: 768, SEQ ID NO: 778, SEQ ID NO: 788, SEQ ID NO: 798, SEQ ID NO: 808, SEQ ID NO: 818, SEQ ID NO: 828, SEQ ID NO: 838, SEQ ID NO: 848, SEQ ID NO: 858, SEQ ID NO: 868, SEQ ID NO: 878, SEQ ID NO: 888, SEQ ID NO: 898, SEQ ID NO: 908, SEQ ID NO: 918, SEQ ID NO: 928, SEQ ID NO: 938, SEQ ID NO: 948, SEQ ID NO: 958, SEQ ID NO: 968, SEQ ID NO: 978, particularly SEQ ID Nos: 728, 568, 758, preferably SEQ ID NO: 728.
   (ix) A method for the treatment and further for the prevention, prophylaxis, amelioraton or reduction of adverse events associated with immunotherapy, particularly cancer immunotherapy, more particularly AML therapy, with an antibody construct comprising at least one domain which binds to FLT3 on the surface of a target cell, and at least one other domain which binds to CD3, preferably human CD3, on the surface of a T cell according to any one of embodiments (i) to (xvi) of general Aspect A) and embodiment (viii) of Sub-Aspect B-3, comprising
[0306] (a) at least one antibody construct referred to in the preamble, and
[0307] (b) an inhibitor/antagonist of TNF/TNFR that reduces TNF/TNFR signaling,
   wherein said inhibitor/antagonist of TNF/TNFR that reduces TNF/TNFR signaling referred to in (b) is for administration to a patient prior to and optionally also following administration of said antibody construct referred to in (a), wherein the domain which binds to FLT3 comprises a VH region selected from the group consisting of a VH region as depicted in any one of SEQ ID NO: 347, SEQ ID NO: 357, SEQ ID NO: 367, SEQ ID NO: 377, SEQ ID NO: 387, SEQ ID NO: 397, SEQ ID NO: 407, SEQ ID NO: 417, SEQ ID NO: 427, SEQ ID NO: 437, SEQ ID NO: 447, SEQ ID NO: 457, SEQ ID NO: 467, SEQ ID NO: 477, SEQ ID NO: 487, SEQ ID NO: 497, SEQ ID NO: 507, SEQ ID NO: 517, SEQ ID NO: 527, SEQ ID NO: 537, SEQ ID NO: 547, SEQ ID NO: 557, SEQ ID NO: 567, SEQ ID NO: 577, SEQ ID NO: 587, SEQ ID NO: 597, SEQ ID NO: 607, SEQ ID NO: 617, SEQ ID NO: 627, SEQ ID NO: 637, SEQ ID NO: 647, SEQ ID NO: 657, SEQ ID NO: 667, SEQ ID NO: 677, SEQ ID NO: 687, SEQ ID NO: 697, SEQ ID NO: 707, SEQ ID NO: 717, SEQ ID NO: 727, SEQ ID NO: 737, SEQ ID NO: 747, SEQ ID NO: 757, SEQ ID NO: 767, SEQ ID NO: 777, SEQ ID NO: 787, SEQ ID NO: 797, SEQ ID NO: 807, SEQ ID NO: 817, SEQ ID NO: 827, SEQ ID NO: 837, SEQ ID NO: 847, SEQ ID NO: 857, SEQ ID NO: 867, SEQ ID NO: 877, SEQ ID NO: 887, SEQ ID NO: 897, SEQ ID NO: 907, SEQ ID NO: 917, SEQ ID NO: 927, SEQ ID NO: 937, SEQ ID NO: 947, SEQ ID NO: 957, SEQ ID NO: 967, SEQ ID NO: 977, particularly SEQ ID Nos: 727, 767, 757, preferably SEQ ID NO: 727.
   (x) A method for the treatment and further for the prevention, prophylaxis, amelioraton or reduction of adverse events associated with immunotherapy, particularly cancer immunotherapy, more particularly AML therapy, with an antibody construct comprising at least one domain which binds to FLT3 on the surface of a target cell, and at least one other domain which binds to CD3, preferably human CD3, on the surface of a T cell according to any one of embodiments (i) to (xvi) of general Aspect A) and embodiments (i) to (ix) of Sub-Aspect B-3, comprising
[0308] (a) at least one antibody construct referred to in the preamble, and
[0309] (b) an inhibitor/antagonist of TNF/TNFR that reduces TNF/TNFR signaling,
   wherein said inhibitor/antagonist of TNF/TNFR that reduces TNF/TNFR signaling referred to in (b) is for administration to a patient prior to and optionally also following administration of said antibody construct referred to in (a), wherein the domain which binds to FLT3 comprises pairs of a VH region and a VL region as depicted in SEQ ID NO: 347+348, SEQ ID NO: 357+358, SEQ ID NO: 367+368, SEQ ID NO: 377+378, SEQ ID NO: 387+388, SEQ ID NO: 397+398, SEQ ID NO: 407+408, SEQ ID NO: 417+418, SEQ ID NO: 427+428, SEQ ID NO: 437+438, SEQ ID NO: 447+448, SEQ ID NO: 457+458, SEQ ID NO: 467+468, SEQ ID NO: 477+478, SEQ ID NO: 487+488, SEQ ID NO: 497+498, SEQ ID NO: 507+508, SEQ ID NO: 517+518, SEQ ID NO: 527+528, SEQ ID NO: 537+538, SEQ ID NO: 547+548, SEQ ID NO: 557+558, SEQ ID NO: 567+568, SEQ ID NO: 577+578, SEQ ID NO: 587+588, SEQ ID NO: 597+598, SEQ ID NO: 607+608, SEQ ID NO: 617+618, SEQ ID NO: 627+628, SEQ ID NO: 637+638, SEQ ID NO: 647+648, SEQ ID NO: 657+658, SEQ ID NO: 667+668, SEQ ID NO: 677+678, SEQ ID NO: 687+688, SEQ ID NO: 697+698, SEQ ID NO: 707+708, SEQ ID NO: 717+718, SEQ ID NO: 727+728, SEQ ID NO: 737+738, SEQ ID NO: 747+748, SEQ ID NO: 757+758, SEQ ID NO: 767+768, SEQ ID NO: 777+778, SEQ ID NO: 787+788, SEQ ID NO: 797+798, SEQ ID NO: 807+808, SEQ ID NO: 817+818, SEQ ID NO: 827+828, SEQ ID NO: 837+838, SEQ ID NO: 847+848, SEQ ID NO: 857+858, SEQ ID NO: 867+868, SEQ ID NO: 877+878, SEQ ID NO: 887+888, SEQ ID NO: 897+898, SEQ ID NO: 907+908, SEQ ID NO: 917+918, SEQ ID NO: 927+928, SEQ ID NO: 937+938, SEQ ID NO: 947+948, SEQ ID NO: 957+958, SEQ ID NO: 967+968, SEQ ID NO: 977+978, and SEQ ID NO: 987+988.
   (xi) A method for the treatment and further for the prevention, prophylaxis, amelioraton or reduction of adverse events associated with immunotherapy, particularly cancer immunotherapy, more particularly AML therapy, with an antibody construct comprising at least one domain which binds to FLT3 on the surface of a target cell, and at least one other domain which binds to CD3, preferably human CD3, on the surface of a T cell according to any one of embodiments (i) to (xvi) of general Aspect A) and embodiments (i) to (x) of Sub-Aspect B-3, comprising
[0310] (a) at least one antibody construct referred to in the preamble, and
[0311] (b) an inhibitor/antagonist of TNF/TNFR that reduces TNF/TNFR signaling,
   wherein said inhibitor/antagonist of TNF/TNFR that reduces TNF/TNFR signaling referred to in (b) is for administration to a patient prior to and optionally also following administration of said antibody construct referred to in (a), wherein the domain which binds to FLT3 comprises a polypeptide selected from the group consisting of those depicted in SEQ ID NO: 349, SEQ ID NO: 359, SEQ ID NO: 369, SEQ ID NO: 379, SEQ ID NO: 389, SEQ ID NO: 399, SEQ ID NO: 409, SEQ ID NO: 419, SEQ ID NO: 429, SEQ ID NO: 439, SEQ ID NO: 449, SEQ ID NO: 459, SEQ ID NO: 469, SEQ ID NO: 479, SEQ ID NO: 489, SEQ ID NO: 499, SEQ ID NO: 509, SEQ ID NO: 519, SEQ ID NO: 529, SEQ ID NO: 539, SEQ ID NO: 549, SEQ ID NO: 559, SEQ ID NO: 569, SEQ ID NO: 579, SEQ ID NO: 589, SEQ ID NO: 599, SEQ ID NO: 609, SEQ ID NO: 619, SEQ ID NO: 629, SEQ ID NO: 639, SEQ ID NO: 649, SEQ ID NO: 659, SEQ ID NO: 669, SEQ ID NO: 679, SEQ ID NO: 689, SEQ ID NO: 699, SEQ ID NO: 709, SEQ ID NO: 719, SEQ ID NO: 729, SEQ ID NO: 739, SEQ ID NO: 749, SEQ ID NO: 759, SEQ ID NO: 769, SEQ ID NO: 779, SEQ ID NO: 789, SEQ ID NO: 799, SEQ ID NO: 809, SEQ ID NO: 819, SEQ ID NO: 829, SEQ ID NO: 839, SEQ ID NO: 849, SEQ ID NO: 859, SEQ ID NO: 869, SEQ ID NO: 879, SEQ ID NO: 889, SEQ ID NO: 899, SEQ ID NO: 909, SEQ ID NO: 919, SEQ ID NO: 929, SEQ ID NO: 939, SEQ ID NO: 949, SEQ ID NO: 959, SEQ ID NO: 969, SEQ ID NO: 979, and SEQ ID NO: 989, particularly SEQ ID NOS: 729, 759, 569, preferably SEQ ID NO: 729.
   (xii) A method for the treatment and further for the prevention, prophylaxis, amelioraton or reduction of adverse events associated with immunotherapy, particularly cancer immunotherapy, more particularly AML therapy, with an antibody construct comprising at least one domain which binds to FLT3 on the surface of a target cell, and at least one other domain which binds to CD3, preferably human CD3, on the surface of a T cell according to any one of embodiments (i) to (xvi) of general Aspect A) and embodiments (i) to (xi) of Sub-Aspect B-3, comprising
[0312] (a) at least one antibody construct referred to in the preamble, and
[0313] (b) an inhibitor/antagonist of TNF/TNFR that reduces TNF/TNFR signaling,
   wherein said inhibitor/antagonist of TNF/TNFR that reduces TNF/TNFR signaling referred to in (b) is for administration to a patient prior to and optionally also following administration of said antibody construct referred to in (a), wherein the domain which binds to FLT3 comprises binding to CD3 and FLT3 as used herein may be selected, for example, from the group comprising SEQ ID Nos: 350, 360, 370, 380, 390, 400, 410, 420, 430, 440, 450, 460, 470, 480, 490, 500, 510, 520, 530, 540, 550, 560, 570, 580, 590, 600, 610, 620, 630, 640, 650, 660, 670, 680, 690, 700, 710, 720, 730, 740, 750, 760, 770, 780, 790, 800, 810, 820, 830, 840, 850, 860, 870, 880, 890, 900, 910, 920, 930, 940, 950, 960, 970, 980, and 990.

### Sub-Aspect B-4—Immunotherapeutic Methods for the Cancer Treatment and Prevention, Prophylaxis of Immunotherapy-Related Adverse Events Using Constructs Binding PSMA

[0314] In accordance with the present invention, methods for the cancer treatment and further for the prevention and/or prophylaxis of cancer immunotherapy-related adverse events are contemplated which relate to antibody constructs binding to CD3 and PSMA comprising those exemplified in WO2017134158, the contents of which are hereby incorporated by reference.

[0315] Several markers for prostate cancer have been identified, including e.g. prostate-specific antigen (PSA), the six transmembrane epithelial antigen of the prostate (STEAP) (Hubert et al., PNAS 96 (1999), 14523-14528), the prostate stem cell antigen (PSCA) (Reiter et al., Proc. Nat. Acad. Sci. 95: 1735-1740, 1998) and the prostate-specific membrane antigen (PSMA; PSM) (Israeli et al., Cancer Res. 53 (1993). PSMA was originally defined by the monoclonal antibody (MAb) 7E11 derived from immunization with a partially purified membrane preparation from the lymph node prostatic adenocarcinoma (LNCaP) cell line (Horoszewicz et al., Anticancer Res. 7 (1987), 927-35). A 2.65-kb cDNA fragment encoding the PSMA protein was cloned and subsequently mapped to chromosome 1 1 p1 1.2 (Israeli et al., loc. cit; O'Keefe et al., Biochem. Biophys. Acta 1443 (1998), 1 13-127). Initial analysis of PSMA demonstrated widespread expression within the cells of the prostatic secretory epithelium. Immunohistochemical staining demonstrated that PSMA was absent to moderately expressed in hyperplastic and benign tissues, while malignant tissues stained with the greatest intensity (Horoszewicz et al., loc. cit.). Consistent with the correlation between PSMA expression and tumor stage, increased levels of PSMA are associated with androgen-independent prostate cancer (PCa). Analysis of tissue samples from patients with prostate cancer has demonstrated elevated PSMA levels after physical castration or androgen-deprivation therapy. Unlike expression of prostate specific antigen, which is downregulated after androgen ablation, PSMA expression is significantly increased in both primary and metastatic tumor specimens (Kawakami et al., Wright et al., loc. cit.). PSMA is also highly expressed in secondary prostatic tumors and occult metastatic disease. Immunohistochemical analysis has revealed relatively intense and homogeneous expression of PSMA within metastatic lesions localized to lymph nodes, bone, soft tissue, and lungs compared with benign prostatic tissues (Chang et al. (2001), loc. cit.; Murphy et al., Cancer 78 (1996), 809-818; Sweat et al., loc. cit.). PSMA is also expressed in the tumor-associated neovasculature of most solid cancers examined yet is absent in the normal vascular endothelium (Chang et al. (1999), Liu et al., Silver et al., loc. cit.). Although the significance of PSMA expression within the vasculature is unknown, the specificity for tumor-associated endothelium makes PSMA a potential target for the treatment of many forms of malignancy.

[0316] The present invention thus relates to methods for the treatment of cancer and further for the prevention, prophylaxis, or reduction of adverse events associated with immunotherapy, particularly cancer immunotherapy, very particularly prostate cancer or metastatic diseases originating from prostate cancer, which comprise antibody constructs having a PSMA binding domain corresponding to PSMA binders, wherein each may be a polypeptide monomer that has an amino acid sequence that is at least 90% identical to, or consists of, a sequence selected from the group from the group consisting of: SEQ ID NO: 17-24 in the sequence listing in WO2017134158, incorporated explicitly be reference. Further, the PSMA binding domain may have an amino acid sequence selected from the group consisting of SEQ ID NOs: 50, 56, 68, 74, 86, 92, 104, 1 10, 122, 128, 140, 146, 158, 164, 176, 182, 194, 200, 212, 218, 230, 236, 248, 254, 266, 272, 284, 290, 302, 308, 320, 335, 350, 365, 380, 395, 410, 425, 440, 455, 470 in the sequence listing disclosed in WO2017134158, which is also incorporated by reference in its entirety.

[0317] The methods for the treatment of cancer and further for the prevention, prophylaxis, or reduction of adverse events associated with immunotherapy, particularly cancer immunotherapy, very particularly prostate cancer or metastatic diseases originating from prostate cancer, more particularly prostate cancer that is characterized by an increased expression of PSMA on the surface of target cells, comprise the administration of an inhibitor/antagonist of TNF/TNFR that reduces TNF/TNFR signaling to a patient prior to administration and optionally also following administration of the herein disclosed antibody constructs binding selectively to PSMA.

[0318] It is envisaged for the methods for the treatment of cancer and further for the prevention, prophylaxis, or reduction of adverse events associated with immunotherapy, particularly cancer immunotherapy, very particularly prostate cancer or metastatic diseases originating from prostate cancer, more particularly prostate cancer that is characterized by an increased expression of PSMA on the surface of target cells, that an antibody construct, which may be used according to the present invention, comprise a VL region comprising CDR-L1, CDR-L2 and CDR-L3 selected from: CDR-L1 as depicted in SEQ ID NO:997, CDR-L2 as depicted in SEQ ID NO: 998, and CDR-L3 as depicted in SEQ ID NO: 999; CDR-L1 as depicted in SEQ ID NO: 1012, CDR-L2 as depicted in SEQ ID NO: 1013, and CDR-L3 as depicted in SEQ ID NO: 1014; and CDR-L1 as depicted in SEQ ID NO: 1027, CDR-L2 as depicted in SEQ ID NO: 1028, and CDR-L3 as depicted in SEQ ID NO: 1029.

[0319] It is envisaged for the methods for the treatment of cancer and further for the prevention, prophylaxis, or reduction of adverse events associated with immunotherapy, particularly cancer immunotherapy, very particularly prostate cancer or metastatic diseases originating from prostate cancer, more particularly prostate cancer that is characterized by an increased expression of PSMA on the surface of target cells, that an antibody construct, which may be used according to the present invention, comprise a VH region comprising CDR-H1, CDR-H2 and CDR-H3 selected from: CDR-H1 as depicted in SEQ ID NO: 994, CDR-H2 as depicted in SEQ ID NO: 995, and CDR-H3 as depicted in SEQ ID NO: 996; CDR-H1 as depicted in SEQ ID NO: 1009, CDR-H2 as depicted in SEQ ID NO: 1010, and CDR-H3 as depicted in SEQ ID NO: 1011, CDR-H1 as depicted in SEQ ID NO: 1024, CDR-H2 as depicted in SEQ ID NO: 1025, and CDR-H3 as depicted in SEQ ID NO: 1026.

[0320] It is envisaged for the methods for the treatment of cancer and further for the prevention, prophylaxis, or reduction of adverse events associated with immunotherapy, particularly cancer immunotherapy, very particularly prostate cancer or metastatic diseases originating from prostate cancer, more particularly prostate cancer that is characterized by an increased expression of PSMA on the surface of target cells, that an antibody construct, which may be used according to the present invention, comprise a VL region comprising CDR-L1, CDR-L2 and CDR-L3 and a VH region comprising CDR-H1, CDR-H2 and CDR-H3 selected from: CDR-L1 as depicted in SEQ ID NO:997, CDR-L2 as depicted in SEQ ID NO: 998, and CDR-L3 as depicted in SEQ ID NO: 999; CDR-L1 as depicted in SEQ ID NO: 1012, CDR-L2 as depicted in SEQ ID NO: 1013, and CDR-L3 as depicted in SEQ ID NO: 1014; and CDR-L1 as depicted in SEQ ID NO: 1027, CDR-L2 as depicted in SEQ ID NO: 1028, and CDR-L3 as depicted in SEQ ID NO: 1029, and CDR-H1 as depicted in SEQ ID NO: 994, CDR-H2 as depicted in SEQ ID NO: 995, and CDR-H3 as depicted in SEQ ID NO: 996; CDR-H1 as depicted in SEQ ID NO: 1009, CDR-H2 as depicted in SEQ ID NO: 1010, and CDR-H3 as depicted in SEQ ID NO: 1011, CDR-H1 as depicted in SEQ ID NO: 1024, CDR-H2 as depicted in SEQ ID NO: 1025, and CDR-H3 as depicted in SEQ ID NO: 1026.

[0321] It is envisaged for the methods for the treatment of cancer and further for the prevention, prophylaxis, or reduction of adverse events associated with immunotherapy, particularly cancer immunotherapy, very particularly prostate cancer or metastatic diseases originating from prostate cancer, more particularly prostate cancer that is characterized by an increased expression of PSMA on the surface of target cells, that an antibody construct, which may be used according to the present invention, comprise a VL region selected from the group of VL regions as depicted in any one of SEQ ID NO: 1001, SEQ ID NO: 1016, and SEQ ID NO: 1031.

[0322] It is envisaged for the methods for the treatment of cancer and further for the prevention, prophylaxis, or reduction of adverse events associated with immunotherapy, particularly cancer immunotherapy, very particularly prostate cancer or metastatic diseases originating from prostate cancer, more particularly prostate cancer that is characterized by an increased expression of PSMA on the surface of target cells, that an antibody construct, which may be used according to the present invention, comprise a VH region selected from the group consisting of a VH region as depicted in any one of SEQ ID NO: 1000, SEQ ID NO: 1015, and SEQ ID NO: 1030.

[0323] It is envisaged for the methods for the treatment of cancer and further for the prevention, prophylaxis, or reduction of adverse events associated with immunotherapy, particularly cancer immunotherapy, very particularly prostate cancer or metastatic diseases originating from prostate cancer, more particularly prostate cancer that is characterized by an increased expression of PSMA on the surface of target cells, that an antibody construct, which may be used according to the present invention, comprise a VL region and a VH region selected from the group consisting of a VL region as depicted in SEQ ID NO: 1001, SEQ ID NO: 1016, or SEQ ID NO: 1031 and a VH region as depicted in SEQ ID NO: SEQ ID NO: 1000, SEQ ID NO: 1015, or SEQ ID NO: 1030.

[0324] It is also envisaged for the antibody construct used in the above methods for the treatment of cancer and further for the prevention, prophylaxis, or reduction of adverse events associated with immunotherapy, particularly cancer immunotherapy, very particularly prostate cancer or metastatic diseases originating from prostate cancer, more particularly prostate cancer that is characterized by an increased expression of PSMA on the surface of target cells, that an antibody construct, which may be used according to the present invention, that the domain which selectively binds to an epitope of PSMA competes with those explicitly recited herein, i.e. those characterized by specific SEQ ID Nos.

[0325] Whether or not an antibody construct binds to the same epitope of PSMA as another given antibody construct can be measured e.g. by epitope mapping with chimeric or truncated target molecules, e.g. as described herein above and in the Examples in WO2017021362.

[0326] Further, whether an antibody construct competes for binding with another given antibody construct can be measured in a competition assay such as a competitive ELISA or a cell-based competition assay. Avidin-coupled microparticles (beads) can also be used. Like an avidin-coated ELISA plate, when reacted with a biotinylated protein, each of these beads can be used as a substrate on which an assay can be performed. Antigen is coated onto a bead and then precoated with the first antibody. The second antibody is added, and any additional binding is determined. Possible means for the read-out includes flow cytometry.

[0327] The antibody constructs binding to PSMA as disclosed above are administered in methods for the treatment of cancer and further for the prevention, prophylaxis, or amelioration of a adverse events associated with the treatment of cancer disease using antibody constructs engaging CD3+ T cells as defined herein, particularly of prostate cancer or a metastatic cancer disease derived from prostate cancer, and which may be part of combination products, kits, etc., and/or may be administered in steps of the methods according to the present invention together with an inhibitor/antagonist of TNF/TNFR that reduces TNF/TNFR signaling, wherein said inhibitor/antagonist of TNF/TNFR that reduces TNF/TNFR signaling in a patient in need thereof, said inhibitor/antagonist being administered prior to administration of said antibody construct, wherein the patient is preferably a human being or a non-human primate, and wherein said inhibitor/antagonist is administered to prevent or reduce cytokine release syndrome (CRS) and/or tumor lysis syndrome (TLS) or other adverse effects associated with administration of a CD3-binding construct as disclosed throughout the present invention and as set out below:

(i) A method for the treatment of cancer and further for the prevention, prophylaxis, or reduction of adverse events associated with immunotherapy, particularly cancer immunotherapy, very particularly prostate cancer or metastatic diseases originating from prostate cancer, more particularly prostate cancer that is characterized by an increased expression of PSMA on the surface of target cells, with an antibody construct comprising at least one domain (also referred to as “first domain”) which binds to a target antigen on the surface of a target cell, and at least one other domain (also referred to as “second domain”) which binds to CD3, preferably human CD3, on the surface of a T cell according to any one of embodiments (i) to (xiv) of general Aspect A), comprising
[0328] (a) at least one antibody construct referred to in the preamble, and
[0329] (b) an inhibitor/antagonist of TNF/TNFR that reduces TNF/TNFR signaling,
   wherein said inhibitor/antagonist of TNF/TNFR that reduces TNF/TNFR signaling referred to in (b) is for administration to a patient prior to and optionally also following administration of said antibody construct referred to in (a), wherein the target antigen is PSMA, and wherein the first domain binds to human PSMA (SEQ ID NO: 993) as disclosed in WO2017134158, more particularly, as disclosed in the sequence listing in WO2017134158, herein preferably those CDRs, VLs, VHs, and antibody constructs shown in SEQ ID Nos: 42 to 474, which selectively bind to PSMA epitopes.
   (ii) The method for the treatment of cancer and further for the prevention, prophylaxis, or reduction of adverse events associated with immunotherapy, particularly cancer immunotherapy, very particularly prostate cancer or metastatic diseases originating from prostate cancer, more particularly prostate cancer that is characterized by an increased expression of PSMA on the surface of target cells, with an antibody construct comprising at least one domain which binds to PSMA on the surface of a target cell, and at least one other domain which binds to CD3, preferably human CD3, on the surface of a T cell according to any one of embodiments (i) to (xiv) of general Aspect A), and embodiment (i) of Sub-Aspect B-4, comprising
[0330] (a) at least one antibody construct referred to in the preamble, and
[0331] (b) an inhibitor/antagonist of TNF/TNFR that reduces TNF/TNFR signaling,
   wherein said inhibitor/antagonist of TNF/TNFR that reduces TNF/TNFR signaling referred to in (b) is for administration to a patient prior to and optionally also following administration of said antibody construct referred to in (a), wherein said antibody construct binds to an epitope that is selectively bound by an antibody/antibody construct that has the following CDRs of the VH chain and/or VL chain respectively: CDR-L1 as depicted in SEQ ID NO:997, CDR-L2 as depicted in SEQ ID NO: 998, and CDR-L3 as depicted in SEQ ID NO: 999; CDR-L1 as depicted in SEQ ID NO: 1012, CDR-L2 as depicted in SEQ ID NO: 1013, and CDR-L3 as depicted in SEQ ID NO: 1014; CDR-L1 as depicted in SEQ ID NO: 1027, CDR-L2 as depicted in SEQ ID NO: 1028, and CDR-L3 as depicted in SEQ ID NO: 1029, and/or CDR-H1 as depicted in SEQ ID NO: 994, CDR-H2 as depicted in SEQ ID NO: 995, and CDR-H3 as depicted in SEQ ID NO: 996; CDR-H1 as depicted in SEQ ID NO: 1009, CDR-H2 as depicted in SEQ ID NO: 1010, and CDR-H3 as depicted in SEQ ID NO: 1011, CDR-H1 as depicted in SEQ ID NO: 1024, CDR-H2 as depicted in SEQ ID NO: 1025, and CDR-H3 as depicted in SEQ ID NO: 1026.
   (iii) The method for the treatment of cancer and further for the prevention, prophylaxis, or reduction of adverse events associated with immunotherapy, particularly cancer immunotherapy, very particularly prostate cancer or metastatic diseases originating from prostate cancer, more particularly prostate cancer that is characterized by an increased expression of PSMA on the surface of target cells, with an antibody construct comprising at least one domain which binds to PSMA on the surface of a target cell, and at least one other domain which binds to CD3, preferably human CD3, on the surface of a T cell according to any one of embodiments (i) to (xiv) of general Aspect A), and embodiments (i) or (ii) of Sub-Aspect B-4, comprising
[0332] (a) at least one antibody construct referred to in the preamble, and
[0333] (b) an inhibitor/antagonist of TNF/TNFR that reduces TNF/TNFR signaling,
   wherein said inhibitor/antagonist of TNF/TNFR that reduces TNF/TNFR signaling referred to in (b) is for administration to a patient prior to and optionally also following administration of said antibody construct referred to in (a), wherein said antibody construct binds to an epitope that is selectively bound by an antibody/antibody construct that has the following CDRs of the VH chain and/or VL chain respectively: CDR-H1 as depicted in SEQ ID NO: 994, CDR-H2 as depicted in SEQ ID NO: 995, and CDR-H3 as depicted in SEQ ID NO: 996; CDR-L1 as depicted in SEQ ID NO:997, CDR-L2 as depicted in SEQ ID NO: 998, and CDR-L3 as depicted in SEQ ID NO: 999; CDR-H1 as depicted in SEQ ID NO: 1009, CDR-H2 as depicted in SEQ ID NO: 1010, and CDR-H3 as depicted in SEQ ID NO: 1011, CDR-L1 as depicted in SEQ ID NO: 1012, CDR-L2 as depicted in SEQ ID NO: 1013, and CDR-L3 as depicted in SEQ ID NO: 1014; and CDR-H1 as depicted in SEQ ID NO: 1024, CDR-H2 as depicted in SEQ ID NO: 1025, and CDR-H3 as depicted in SEQ ID NO: 1026, CDR-L1 as depicted in SEQ ID NO: 1027, CDR-L2 as depicted in SEQ ID NO: 1028, and CDR-L3 as depicted in SEQ ID NO: 1029.
   (iv) The method for the treatment of cancer and further for the prevention, prophylaxis, or reduction of adverse events associated with immunotherapy, particularly cancer immunotherapy, very particularly prostate cancer or metastatic diseases originating from prostate cancer, more particularly prostate cancer that is characterized by an increased expression of PSMA on the surface of target cells, with an antibody construct comprising at least one domain which binds to PSMA on the surface of a target cell, and at least one other domain which binds to CD3, preferably human CD3, on the surface of a T cell according to any one of embodiments (i) to (xiv) of general Aspect A), and embodiments (i) to (iii) of Sub-Aspect B-4, comprising
[0334] (a) at least one antibody construct referred to in the preamble, and
[0335] (b) an inhibitor/antagonist of TNF/TNFR that reduces TNF/TNFR signaling,
   wherein said inhibitor/antagonist of TNF/TNFR that reduces TNF/TNFR signaling referred to in (b) is for administration to a patient prior to and optionally also following administration of said antibody construct referred to in (a), wherein said antibody construct has the following CDRs of the VH chain and/or VL chain respectively: CDR-L1 as depicted in SEQ ID NO:997, CDR-L2 as depicted in SEQ ID NO: 998, and CDR-L3 as depicted in SEQ ID NO: 999; CDR-L1 as depicted in SEQ ID NO: 1012, CDR-L2 as depicted in SEQ ID NO: 1013, and CDR-L3 as depicted in SEQ ID NO: 1014; CDR-L1 as depicted in SEQ ID NO: 1027, CDR-L2 as depicted in SEQ ID NO: 1028, and CDR-L3 as depicted in SEQ ID NO: 1029, and/or CDR-H1 as depicted in SEQ ID NO: 994, CDR-H2 as depicted in SEQ ID NO: 995, and CDR-H3 as depicted in SEQ ID NO: 996; CDR-H1 as depicted in SEQ ID NO: 1009, CDR-H2 as depicted in SEQ ID NO: 1010, and CDR-H3 as depicted in SEQ ID NO: 1011, CDR-H1 as depicted in SEQ ID NO: 1024, CDR-H2 as depicted in SEQ ID NO: 1025, and CDR-H3 as depicted in SEQ ID NO: 1026.
   (v) The method for the treatment of cancer and further for the prevention, prophylaxis, or reduction of adverse events associated with immunotherapy, particularly cancer immunotherapy, very particularly prostate cancer or metastatic diseases originating from prostate cancer, more particularly prostate cancer that is characterized by an increased expression of PSMA on the surface of target cells, with an antibody construct comprising at least one domain which binds to PSMA on the surface of a target cell, and at least one other domain which binds to CD3, preferably human CD3, on the surface of a T cell according to any one of embodiments (i) to (xiv) of general Aspect A), and embodiments (i) to (iv) of Sub-Aspect B-4, comprising
[0336] (a) at least one antibody construct referred to in the preamble, and
[0337] (b) an inhibitor/antagonist of TNF/TNFR that reduces TNF/TNFR signaling,
   wherein said inhibitor/antagonist of TNF/TNFR that reduces TNF/TNFR signaling referred to in (b) is for administration to a patient prior to and optionally also following administration of said antibody construct referred to in (a), wherein said antibody construct has the following CDRs of the VH chain and/or VL chain respectively: CDR-H1 as depicted in SEQ ID NO: 994, CDR-H2 as depicted in SEQ ID NO: 995, and CDR-H3 as depicted in SEQ ID NO: 996; CDR-L1 as depicted in SEQ ID NO:997, CDR-L2 as depicted in SEQ ID NO: 998, and CDR-L3 as depicted in SEQ ID NO: 999; CDR-H1 as depicted in SEQ ID NO: 1009, CDR-H2 as depicted in SEQ ID NO: 1010, and CDR-H3 as depicted in SEQ ID NO: 1011, CDR-L1 as depicted in SEQ ID NO: 1012, CDR-L2 as depicted in SEQ ID NO: 1013, and CDR-L3 as depicted in SEQ ID NO: 1014; and CDR-H1 as depicted in SEQ ID NO: 1024, CDR-H2 as depicted in SEQ ID NO: 1025, and CDR-H3 as depicted in SEQ ID NO: 1026, CDR-L1 as depicted in SEQ ID NO: 1027, CDR-L2 as depicted in SEQ ID NO: 1028, and CDR-L3 as depicted in SEQ ID NO: 1029.
   (vi) The method for the treatment of cancer and further for the prevention, prophylaxis, or reduction of adverse events associated with immunotherapy, particularly cancer immunotherapy, very particularly prostate cancer or metastatic diseases originating from prostate cancer, more particularly prostate cancer that is characterized by an increased expression of PSMA on the surface of target cells, with an antibody construct comprising at least one domain which binds to PSMA on the surface of a target cell, and at least one other domain which binds to CD3, preferably human CD3, on the surface of a T cell according to any one of embodiments (i) to (xiv) of general Aspect A), and embodiments (i) to (v) of Sub-Aspect B-4, comprising administering an antibody construct comprising a VL region selected from the group of VL regions as depicted in any one of SEQ ID NO: 1001, SEQ ID NO: 1016, and SEQ ID NO: 1031.
   (vii) The method for the treatment of cancer and further for the prevention, prophylaxis, or reduction of adverse events associated with immunotherapy, particularly cancer immunotherapy, very particularly prostate cancer or metastatic diseases originating from prostate cancer, more particularly prostate cancer that is characterized by an increased expression of PSMA on the surface of target cells, with an antibody construct comprising at least one domain which binds to PSMA on the surface of a target cell, and at least one other domain which binds to CD3, preferably human CD3, on the surface of a T cell according to any one of embodiments (i) to (xiv) of general Aspect A), and embodiments (i) to (vi) of Sub-Aspect B-4, comprising administering an antibody construct comprising a VH region selected from the group consisting of a VH region as depicted in any one of SEQ ID NO: 1000, SEQ ID NO: 1015, and SEQ ID NO: 1030.
   (viii) The method for the treatment of cancer and further for the prevention, prophylaxis, or reduction of adverse events associated with immunotherapy, particularly cancer immunotherapy, very particularly prostate cancer or metastatic diseases originating from prostate cancer, more particularly prostate cancer that is characterized by an increased expression of PSMA on the surface of target cells, with an antibody construct comprising at least one domain which binds to PSMA on the surface of a target cell, and at least one other domain which binds to CD3, preferably human CD3, on the surface of a T cell according to any one of embodiments (i) to (xiv) of general Aspect A), and embodiments (i) to (vii) of Sub-Aspect B-4, comprising administering an antibody construct comprising a VL region that binds to an epitope that is that is selectively bound by an antibody/antibody construct comprising a VL region selected from the group comprising VL regions as depicted in any one of SEQ ID NO: 1001, SEQ ID NO: 1016, and SEQ ID NO: 1031.
   (ix) The method for the treatment of cancer and further for the prevention, prophylaxis, or reduction of adverse events associated with immunotherapy, particularly cancer immunotherapy, very particularly prostate cancer or metastatic diseases originating from prostate cancer, more particularly prostate cancer that is characterized by an increased expression of PSMA on the surface of target cells, with an antibody construct comprising at least one domain which binds to PSMA on the surface of a target cell, and at least one other domain which binds to CD3, preferably human CD3, on the surface of a T cell according to any one of embodiments (i) to (xiv) of general Aspect A), and embodiments (i) to (viii) of Sub-Aspect B-4, comprising administering an antibody construct comprising a VH region that binds to an epitope that is that is selectively bound by an antibody/antibody construct comprising a VH region selected from the group comprising a VH region as depicted in any one of SEQ ID NO: 1000, SEQ ID NO: 1015, and SEQ ID NO: 1030.
   (x) The method for the treatment of cancer and further for the prevention, prophylaxis, or reduction of adverse events associated with immunotherapy, particularly cancer immunotherapy, very particularly prostate cancer or metastatic diseases originating from prostate cancer, more particularly prostate cancer that is characterized by an increased expression of PSMA on the surface of target cells, with an antibody construct comprising at least one domain which binds to PSMA on the surface of a target cell, and at least one other domain which binds to CD3, preferably human CD3, on the surface of a T cell according to any one of embodiments (i) to (xiv) of general Aspect A), and embodiments (i) to (ix) of Sub-Aspect B-4, comprising administering an antibody construct comprising a VL region and a VH region selected from the group consisting of a VL region as depicted in SEQ ID NO: 1001, SEQ ID NO: 1016, or SEQ ID NO: 1031 and a VH region as depicted in SEQ ID NO: SEQ ID NO: 1000, SEQ ID NO: 1015, or SEQ ID NO: 1030.
   (xi) The method for the treatment of cancer and further for the prevention, prophylaxis, or reduction of adverse events associated with immunotherapy, particularly cancer immunotherapy, very particularly prostate cancer or metastatic diseases originating from prostate cancer, more particularly prostate cancer that is characterized by an increased expression of PSMA on the surface of target cells, with an antibody construct comprising at least one domain which binds to PSMA on the surface of a target cell, and at least one other domain which binds to CD3, preferably human CD3, on the surface of a T cell according to any one of embodiments (i) to (xiv) of general Aspect A), and embodiments (i) to (x) of Sub-Aspect B-4, comprising administering an antibody construct comprising a pair of a VL region and a VH region that binds to an epitope to an epitope that is that is selectively bound by an antibody/antibody construct that is selected from the group consisting of a pair of a VL region as depicted in SEQ ID NO: 1001, SEQ ID NO: 1016, or SEQ ID NO: 1031 and a VH region as depicted in SEQ ID NO: SEQ ID NO: 1000, SEQ ID NO: 1015, or SEQ ID NO: 1030.
   (xii) The method for the treatment of cancer and further for the prevention, prophylaxis, or reduction of adverse events associated with immunotherapy, particularly cancer immunotherapy, very particularly prostate cancer or metastatic diseases originating from prostate cancer, more particularly prostate cancer that is characterized by an increased expression of PSMA on the surface of target cells, with an antibody construct comprising at least one domain which binds to PSMA on the surface of a target cell, and at least one other domain which binds to CD3, preferably human CD3, on the surface of a T cell according to any one of embodiments (i) to (xiv) of general Aspect A), and embodiments (i) to (xi) of Sub-Aspect B-4, comprising
[0338] (a) administering an antibody construct comprising at least one antibody construct referred to in the preamble, and
[0339] (b) administering an inhibitor/antagonist of TNF/TNFR that reduces TNF/TNFR signaling,
   wherein said inhibitor/antagonist of TNF/TNFR that reduces TNF/TNFR signaling referred to in (b) is for administration to a patient prior to and optionally also following administration of said antibody construct referred to in (a), wherein the domain which binds to PSMA comprises a polypeptide selected from the group consisting of those depicted in SEQ ID NO: 1002, SEQ ID NO: 1017, and SEQ ID NO: 1032, and/or binds to an epitope selectively bound by a polypeptide selected from the group consisting of those depicted in SEQ ID NO: 1002, SEQ ID NO: 1017, and SEQ ID NO: 1032.
   (xiii) The method for the treatment of cancer and further for the prevention, prophylaxis, or reduction of adverse events associated with immunotherapy, particularly cancer immunotherapy, very particularly prostate cancer or metastatic diseases originating from prostate cancer, more particularly prostate cancer that is characterized by an increased expression of PSMA on the surface of target cells, with an antibody construct comprising at least one domain which binds to PSMA on the surface of a target cell, and at least one other domain which binds to CD3, preferably human CD3, on the surface of a T cell according to any one of embodiments (i) to (xiv) of general Aspect A), and embodiments (i) to (xii) of Sub-Aspect B-4, comprising
[0340] (a) administering an antibody construct comprising at least one antibody construct referred to in the preamble, and
[0341] (b) administering an inhibitor/antagonist of TNF/TNFR that reduces TNF/TNFR signaling,
   wherein said inhibitor/antagonist of TNF/TNFR that reduces TNF/TNFR signaling referred to in (b) is for administration to a patient prior to and optionally also following administration of said antibody construct referred to in (a), wherein the domain which binds to PSMA is comprised by a polypeptide selected from the group comprising antibody constructs depicted in SEQ ID Nos: 1003, 1004, 1005, 1006, 1007, 1008, 1018, 1019, 1020, 1021, 1022, 1023, 1033, 1034, 1035, 1036, 1037, and 1038, and/or binds to an epitope selectively bound by a polypeptide selected from the group comprising antibody constructs depicted in SEQ ID NOs: 1003, 1004, 1005, 1006, 1007, 1008, 1018, 1019, 1020, 1021, 1022, 1023, 1033, 1034, 1035, 1036, 1037, and 1038.

### Sub-Aspect B-5—Immunotherapeutic Methods for the Treatment of Cancer and Prevention, Prophylaxis of Immunotherapy-Related Adverse Events Using Constructs Binding DLL3

[0342] In accordance with the present invention, antibody constructs binding to CD3 and DLL3 comprise those exemplified in WO2017021349, the contents of which are hereby incorporated by reference are used in methods for treatment of cancer cells that are DLL3+ and further for the prevention, prophylaxis or reduction of adverse events associated with immunotherapy, particularly cancer immunotherapy.

[0343] As used herein, the DLL3 binding antibody constructs are exemplified by the selective DLL3-binding sequences disclosed explicitly in WO2017021349 and in WO2019200007, both of which are hereby incorporated by reference in their entireties. The protein sequences of different isotypes of DLL3 are shown in SEQ ID Nos: 29 and 30 of WO2017021349, respectively. The DLL3 targeting domains comprise the CDR sequences explicitly disclosed in SEQ ID Nos: 42-69.

[0344] The methods according to the present invention, wherein DLL3 is targeted and for which combination products, kits, etc. are envisioned are immunotherapies, wherein the cancer is adrenal, liver, kidney, bladder, breast, gastric, ovarian, cervical, uterine, esophageal, colorectal, prostate (e.g., prostate adenocarcinoma), pancreatic, lung (both small cell and non-small cell), thyroid, carcinomas, sarcomas, glioblastomas, head and neck tumors, large cell neuroendocrine carcinoma (LCNEC), medullary thyroid cancer, glioblastoma, neuroendocrine prostate cancer, (NEPC), high-grade gastroenteropancreatic cancer (GEP) and malignant melanoma, preferably, wherein the cancer is small cell lung cancer.

[0345] It is also envisaged for the antibody construct used in methods in accordance with the present invention that the domain which selectively binds to an epitope of DLL3 that it competes with those explicitly recited herein below, i.e. those characterized by specific SEQ ID Nos. Whether or not an antibody construct binds to the same epitope of DLL3 as another given antibody construct can be measured e.g. by epitope mapping with chimeric or truncated target molecules, e.g. as described herein above and in the Examples in WO2017021362. Further, whether an antibody construct competes for binding with another given antibody construct can be measured in a competition assay such as a competitive ELISA or a cell-based competition assay. Avidin-coupled microparticles (beads) can also be used. Like an avidin-coated ELISA plate, when reacted with a biotinylated protein, each of these beads can be used as a substrate on which an assay can be performed. Antigen is coated onto a bead and then precoated with the first antibody. The second antibody is added, and any additional binding is determined. Possible means for the read-out includes flow cytometry.

[0346] Further, antibody constructs comprising a binding domain which binds to human DLL3 on the surface of a target cell and a second binding domain which binds to CD3, preferably human CD3, on the surface of a T cell and at least macaque CD3 correspond to those, wherein the first binding domain binds to an epitope of DLL3 which is comprised within the region as depicted in SEQ ID NO: 260 as disclosed in WO2017021349. The antibody constructs may have a binding domain that binds to an epitope of DLL3 which is comprised within the region as depicted in SEQ ID NO: 258 as disclosed in WO2017021349.

[0347] The antibody constructs used in the methods of the present invention may have a binding domain that comprises a VH region comprising CDR-H1, CDR-H2 and CDR-H3 and a VL region comprising CDR-L1, CDR-L2 and CDR-L3 disclosed in the sequence listing in WO2017021349, which are selected from the group consisting of: CDR-H1 as depicted in SEQ ID NO: 1040, CDR-H2 as depicted in SEQ ID NO: 1041, CDR-H3 as depicted in SEQ ID NO: 1042, CDR-L1 as depicted in SEQ ID NO: 1043, CDR-L2 as depicted in SEQ ID NO: 1044 and CDR-L3 as depicted in SEQ ID NO: 1045; CDR-H1 as depicted in SEQ ID NO: 1046, CDR-H2 as depicted in SEQ ID NO: 1047, CDR-H3 as depicted in SEQ ID NO: 1048, CDR-L1 as depicted in SEQ ID NO: 1049, CDR-L2 as depicted in SEQ ID NO: 1050 and CDR-L3 as depicted in SEQ ID NO: 1051; CDR-H1 as depicted in SEQ ID NO: 1052, CDR-H2 as depicted in SEQ ID NO: 1053, CDR-H3 as depicted in SEQ ID NO: 1054, CDR-L1 as depicted in SEQ ID NO: 1055, CDR-L2 as depicted in SEQ ID NO: 1056 and CDR-L3 as depicted in SEQ ID NO: 1057; CDR-H1 as depicted in SEQ ID NO: 1058, CDR-H2 as depicted in SEQ ID NO: 1059, CDR-H3 as depicted in SEQ ID NO: 1060, CDR-L1 as depicted in SEQ ID NO: 1061, CDR-L2 as depicted in SEQ ID NO: 1062 and CDR-L3 as depicted in SEQ ID NO: 1063; CDR-H1 as depicted in SEQ ID NO: 1064, CDR-H2 as depicted in SEQ ID NO: 1065, CDR-H3 as depicted in SEQ ID NO: 1066, CDR-L1 as depicted in SEQ ID NO: 1067, CDR-L2 as depicted in SEQ ID NO: 1068 and CDR-L3 as depicted in SEQ ID NO: 1069; CDR-H1 as depicted in SEQ ID NO: 1070, CDR-H2 as depicted in SEQ ID NO: 1071, CDR-H3 as depicted in SEQ ID NO: 1072, CDR-L1 as depicted in SEQ ID NO: 1073, CDR-L2 as depicted in SEQ ID NO: 1074 and CDR-L3 as depicted in SEQ ID NO: 1075; CDR-H1 as depicted in SEQ ID NO: 1076, CDR-H2 as depicted in SEQ ID NO: 1077, CDR-H3 as depicted in SEQ ID NO: 1078, CDR-L1 as depicted in SEQ ID NO: 1079, CDR-L2 as depicted in SEQ ID NO: 1080 and CDR-L3 as depicted in SEQ ID NO: 1081; CDR-H1 as depicted in SEQ ID NO: 1082, CDR-H2 as depicted in SEQ ID NO: 1083, CDR-H3 as depicted in SEQ ID NO: 1084, CDR-L1 as depicted in SEQ ID NO: 1085, CDR-L2 as depicted in SEQ ID NO: 1086 and CDR-L3 as depicted in SEQ ID NO: 1087; and CDR-H1 as depicted in SEQ ID NO: 1088, CDR-H2 as depicted in SEQ ID NO: 1089, CDR-H3 as depicted in SEQ ID NO: 1090, CDR-L1 as depicted in SEQ ID NO: 1091, CDR-L2 as depicted in SEQ ID NO: 1092 and CDR-L3 as depicted in SEQ ID NO: 1093.

[0348] The antibody constructs used in the methods of the present invention may have a binding domain that comprises a VH region selected from the group consisting of those depicted in SEQ ID NO: 1094, SEQ ID NO: 1095, SEQ ID NO: 1096, SEQ ID NO: 1097, SEQ ID NO: 1098, SEQ ID NO: 1099, SEQ ID NO: 1100, SEQ ID NO: 1101, SEQ ID NO: 1102, SEQ ID NO: 1103 and SEQ ID NO: 1104.

[0349] The antibody constructs used in the methods of the present invention may have a binding domain that comprises a VL region selected from the group consisting of those depicted in SEQ ID NO: 1105, SEQ ID NO: 1106, SEQ ID NO: 1107, SEQ ID NO: 1108, SEQ ID NO: 1109, SEQ ID NO: 1110, SEQ ID NO: 1111, SEQ ID NO: 1112, SEQ ID NO: 1113, SEQ ID NO: 1114 and SEQ ID NO: 1115.

[0350] The antibody constructs used in the methods of the present invention may have a binding domain that comprises a VH region and a VL region selected from the group consisting of pairs of a VH region and a VL region as depicted in SEQ ID NOs: 1094+1105; SEQ ID NOs: 1095+1106; SEQ ID NOs: 1096+1107; SEQ ID NOs: 1097+1108; SEQ ID NOs: 1098+1109; SEQ ID NOs: 1099+1110; SEQ ID NOs: 1100+1111; SEQ ID NOs: 1101+1112; SEQ ID NOs: 1102+1113; SEQ ID NOs: 1103+1114; and SEQ ID NOs: 1104+1115.

[0351] The antibody constructs used in the methods of the present invention may have a binding domain that comprises a polypeptide selected from the group consisting of those depicted in SEQ ID NO: 1116, SEQ ID NO: 1117, SEQ ID NO: 1118, SEQ ID NO: 1119, SEQ ID NO: 1120, SEQ ID NO: 1121, SEQ ID NO: 1122, SEQ ID NO: 1123, SEQ ID NO: 1124, SEQ ID NO: 1125 and SEQ ID NO: 1126.

[0352] The antibody constructs used in the methods of the present invention may have a binding domain that comprises a polypeptide selected from the group consisting of those depicted in SEQ ID NO: 1127, SEQ ID NO: 1128, SEQ ID NO: 1129, SEQ ID NO: 1130, SEQ ID NO: 1131, SEQ ID NO: 1132, SEQ ID NO: 1133, SEQ ID NO: 1134, SEQ ID NO: 1135, SEQ ID NO: 1136, SEQ ID NO: 1137, SEQ ID NO: 1139, SEQ ID NO: 1140, SEQ ID NO: 1141, SEQ ID NO: 1142, SEQ ID NO: 1143, SEQ ID NO: 1144 and SEQ ID NO: 1145.

[0353] The antibody constructs used in the methods of the present invention may have a binding domain that binds to an epitope of DLL3 which is comprised within the region as depicted in SEQ ID NO: 1146.

[0354] The antibody constructs used in the methods of the present invention may have a binding domain that comprises a VH region comprising CDR-H1, CDR-H2 and CDR-H3 and a VL region comprising CDR-L1, CDR-L2 and CDR-L3 selected from the group consisting of: CDR-H1 as depicted in SEQ ID NO: 1147, CDR-H2 as depicted in SEQ ID NO: 1148, CDR-H3 as depicted in SEQ ID NO: 1149, CDR-L1 as depicted in SEQ ID NO: 1150, CDR-L2 as depicted in SEQ ID NO: 1151 and CDR-L3 as depicted in SEQ ID NO: 1152; CDR-H1 as depicted in SEQ ID NO: 1153, CDR-H2 as depicted in SEQ ID NO: 1154, CDR-H3 as depicted in SEQ ID NO: 1155, CDR-L1 as depicted in SEQ ID NO: 1156, CDR-L2 as depicted in SEQ ID NO: 1157 and CDR-L3 as depicted in SEQ ID NO: 1158; CDR-H1 as depicted in SEQ ID NO: 1159, CDR-H2 as depicted in SEQ ID NO: 1160, CDR-H3 as depicted in SEQ ID NO: 1161, CDR-L1 as depicted in SEQ ID NO: 1162, CDR-L2 as depicted in SEQ ID NO: 1163 and CDR-L3 as depicted in SEQ ID NO: 1164; CDR-H1 as depicted in SEQ ID NO: 1165, CDR-H2 as depicted in SEQ ID NO: 1166, CDR-H3 as depicted in SEQ ID NO: 1167, CDR-L1 as depicted in SEQ ID NO: 1168, CDR-L2 as depicted in SEQ ID NO: 1169 and CDR-L3 as depicted in SEQ ID NO: 1170; CDR-H1 as depicted in SEQ ID NO: 1171, CDR-H2 as depicted in SEQ ID NO: 1172, CDR-H3 as depicted in SEQ ID NO: 1173, CDR-L1 as depicted in SEQ ID NO: 1174, CDR-L2 as depicted in SEQ ID NO: 1175 and CDR-L3 as depicted in SEQ ID NO: 1176; CDR-H1 as depicted in SEQ ID NO: 1153, CDR-H2 as depicted in SEQ ID NO: 1177, CDR-H3 as depicted in SEQ ID NO: 1155, CDR-L1 as depicted in SEQ ID NO: 1156, CDR-L2 as depicted in SEQ ID NO: 1157 and CDR-L3 as depicted in SEQ ID NO: 1158; CDR-H1 as depicted in SEQ ID NO: 1153, CDR-H2 as depicted in SEQ ID NO: 1178, CDR-H3 as depicted in SEQ ID NO: 1155, CDR-L1 as depicted in SEQ ID NO: 1156, CDR-L2 as depicted in SEQ ID NO: 1157 and CDR-L3 as depicted in SEQ ID NO: 1158; CDR-H1 as depicted in SEQ ID NO: 1153, CDR-H2 as depicted in SEQ ID NO: 1154, CDR-H3 as depicted in SEQ ID NO: 1155, CDR-L1 as depicted in SEQ ID NO: 1179, CDR-L2 as depicted in SEQ ID NO: 1157 and CDR-L3 as depicted in SEQ ID NO: 1158; CDR-H1 as depicted in SEQ ID NO: 1153, CDR-H2 as depicted in SEQ ID NO: 1154, CDR-H3 as depicted in SEQ ID NO: 1155, CDR-L1 as depicted in SEQ ID NO: 1180, CDR-L2 as depicted in SEQ ID NO: 1157 and CDR-L3 as depicted in SEQ ID NO: 1158; CDR-H1 as depicted in SEQ ID NO: 1153, CDR-H2 as depicted in SEQ ID NO: 1154, CDR-H3 as depicted in SEQ ID NO: 1155, CDR-L1 as depicted in SEQ ID NO: 1181, CDR-L2 as depicted in SEQ ID NO: 1157 and CDR-L3 as depicted in SEQ ID NO: 1158; CDR-H1 as depicted in SEQ ID NO: 1153, CDR-H2 as depicted in SEQ ID NO: 1154, CDR-H3 as depicted in SEQ ID NO: 1155, CDR-L1 as depicted in SEQ ID NO: 1182, CDR-L2 as depicted in SEQ ID NO: 1157 and CDR-L3 as depicted in SEQ ID NO: 1158; CDR-H1 as depicted in SEQ ID NO: 1153, CDR-H2 as depicted in SEQ ID NO: 1177, CDR-H3 as depicted in SEQ ID NO: 1155, CDR-L1 as depicted in SEQ ID NO: 1179, CDR-L2 as depicted in SEQ ID NO: 1157 and CDR-L3 as depicted in SEQ ID NO: 1158; and CDR-H1 as depicted in SEQ ID NO: 1153, CDR-H2 as depicted in SEQ ID NO: 1178, CDR-H3 as depicted in SEQ ID NO: 1155, CDR-L1 as depicted in SEQ ID NO: 1180, CDR-L2 as depicted in SEQ ID NO: 1157 and CDR-L3 as depicted in SEQ ID NO: 1158.

[0355] The antibody constructs used in the methods of the present invention may have a binding domain that comprises a VH region selected from the group consisting of those depicted in SEQ ID NO: 1183, SEQ ID NO: 1184, SEQ ID NO: 1185, SEQ ID NO: 1186, SEQ ID NO: 1187, SEQ ID NO: 1188, SEQ ID NO: 1189, SEQ ID NO: 1190, SEQ ID NO: 1191, SEQ ID NO: 1192, SEQ ID NO: 1193, SEQ ID NO: 1194, SEQ ID NO: 1195, SEQ ID NO: 1196, SEQ ID NO: 1197, and SEQ ID NO: 1198.

[0356] The antibody constructs used in the methods of the present invention may have a binding domain that comprises a VL region selected from the group consisting of those depicted in SEQ ID NO: 1199, SEQ ID NO: 1200, SEQ ID NO: 1201, SEQ ID NO: 1202, SEQ ID NO: 1203, SEQ ID NO: 1204, SEQ ID NO: 1205, SEQ ID NO: 1206, SEQ ID NO: 1207, SEQ ID NO: 1208, SEQ ID NO: 1209, SEQ ID NO: 1210, SEQ ID NO: 1211, SEQ ID NO: 1212, SEQ ID NO: 1213, SEQ ID NO: 1214, SEQ ID NO: 1215, SEQ ID NO: 1216, SEQ ID NO: 1217, and SEQ ID NO: 1218.

[0357] The antibody constructs used in the methods of the present invention may have a binding domain that comprises a VH region and a VL region selected from the group consisting of pairs of a VH region and a VL region as depicted in SEQ ID NOs: 1183+1199; SEQ ID NOs: 1184+1200; SEQ ID NOs: 1185+1201; SEQ ID NOs: 1186+1202; SEQ ID NOs: 1187+1203; SEQ ID NOs 1184+1204; SEQ ID NOs 1184+1205; SEQ ID NOs 1184+12168; SEQ ID NOs 1184+1207; SEQ ID NOs 1184+1208; SEQ ID NOs 1188+1200; SEQ ID NOs 1189+1200; SEQ ID NOs 1190+1200; SEQ ID NOs 1188+1208; SEQ ID NOs 1191+1209; 1192+1210; SEQ ID NOs 1192+1210; SEQ ID NOs 1193+1211; SEQ ID NOs 1193+1212; SEQ ID NOs 1193+1213; SEQ ID NOs 1193+1214; SEQ ID NOs 1193+1215; SEQ ID NOs 1193+1216; SEQ ID NOs 1194+1211; SEQ ID NOs 1195+1211; SEQ ID NOs 1196+1211; SEQ ID NOs 1194+1216; SEQ ID NOs 1197+1217; and SEQ ID NOs 1198+1218.

[0358] The antibody constructs used in the methods of the present invention may have a binding domain that comprises a polypeptide selected from the group consisting of those depicted in SEQ ID NO: 1219, SEQ ID NO: 1220, SEQ ID NO: 1221, SEQ ID NO: 1222, SEQ ID NO: 1223, SEQ ID NO: 1224, SEQ ID NO: 1225, SEQ ID NO: 1226, SEQ ID NO: 1227, SEQ ID NO: 1228, SEQ ID NO: 1229476, SEQ ID NO: 1230, SEQ ID NO: 1231, SEQ ID NO: 1232, SEQ ID NO: 1233, SEQ ID NO: 1234, SEQ ID NO: 1235, SEQ ID NO: 1236, SEQ ID NO: 1237, SEQ ID NO: 1238, SEQ ID NO: 1239, SEQ ID NO: 1240, SEQ ID NO: 1241, SEQ ID NO: 1242, SEQ ID NO: 1243, SEQ ID NO: 1244, SEQ ID NO: 1245, and SEQ ID NO: 1246.

[0359] The antibody constructs used in the methods of the present invention may have a binding domain that comprises a polypeptide selected from the group consisting of those depicted in SEQ ID NO: 1247, SEQ ID NO: 1248, SEQ ID NO: 1249, SEQ ID NO: 1250, SEQ ID NO: 1251; SEQ ID NO: 1252, SEQ ID NO: 1253, SEQ ID NO: 1254, SEQ ID NO: 1255, SEQ ID NO: 1256, SEQ ID NO: 1257, SEQ ID NO: 1258, SEQ ID NO: 1259, SEQ ID NO: 1260, SEQ ID NO: 1261, SEQ ID NO: 1262, SEQ ID NO: 1263, SEQ ID NO: 1264, SEQ ID NO: 1265, SEQ ID NO: 1266, SEQ ID NO: 1267, SEQ ID NO: 1268, SEQ ID NO: 1269, SEQ ID NO: 1270, SEQ ID NO: 1271, SEQ ID NO: 1272, SEQ ID NO: 1273, SEQ ID NO: 1274, SEQ ID NO: 1275, SEQ ID NO: 1276, and SEQ ID NO: 1277.

[0360] The antibody constructs used in the methods of the present invention may have a binding domain that comprises or consists of a polypeptide selected from the group consisting of those depicted in SEQ ID NO: 1278, SEQ ID NO: 1279, SEQ ID NO: 1280, SEQ ID NO: 1281, SEQ ID NO: 1282, SEQ ID NO: 1283, SEQ ID NO: 1284, SEQ ID NO: 1285.

[0361] The antibody constructs binding to DLL3 as disclosed above are used in methods for the treatment of DLL3+ positive cancers and further for the prevention, prophylaxis, or amelioration of adverse events associated with immunotherapy, particularly of a cancer referred to supra, and may be parts of combination products, kits, etc., and/or may be used in or administered in steps of the methods according to the present invention, i.e. together with an inhibitor/antagonist of TNF/TNFR that reduces TNF/TNFR signaling, wherein said inhibitor/antagonist of TNF/TNFR that reduces TNF/TNFR signaling is administered to a patient in need thereof prior to administration of said antibody construct, wherein the patient is preferably a human being or a non-human primate, and wherein said inhibitor/antagonist is administered to prevent or reduce cytokine release syndrome (CRS) or other adverse effects associated with administration of a CD3-binding construct as disclosed throughout the present invention and as set out below:

(i) A method for the treatment of DLL3+ positive cancers and further for the prevention, prophylaxis, or amelioration of adverse events associated with immunotherapy, wherein the cancer is selected from the group consisting of lung cancer, preferably SCLC, breast, cervical, colon, colorectal, endometrial, head and neck, liver, ovarian, pancreatic, prostate, skin, gastric, testis, thyroid, adrenal, renal, bladder, uterine, esophageal, urothelial and brain tumor or cancer, lymphoma, carcinoma, and sarcoma, and a metastatic cancer disease derived from any of the foregoing, with an antibody construct comprising at least one domain (also referred to as “first domain”) which binds to a target antigen on the surface of a target cell, and at least one other domain which binds to CD3, preferably human CD3, on the surface of a T cell according to any one of embodiments (i) to (xiv) of general Aspect A), comprising
[0362] (a) at least one antibody construct referred to in the preamble, and
[0363] (b) an inhibitor/antagonist of TNF/TNFR that reduces TNF/TNFR signaling,
   wherein said inhibitor/antagonist of TNF/TNFR that reduces TNF/TNFR signaling referred to in (b) is for administration to a patient prior to and optionally also following administration of said antibody construct referred to in (a), wherein the first domain binds selectively to human DLL3.
   (ii) The method for the treatment of DLL3+ positive cancers and further for the prevention, prophylaxis, or amelioration of adverse events associated with immunotherapy, wherein the cancer is selected from the group consisting of lung cancer, preferably SCLC, breast, cervical, colon, colorectal, endometrial, head and neck, liver, ovarian, pancreatic, prostate, skin, gastric, testis, thyroid, adrenal, renal, bladder, uterine, esophageal, urothelial and brain tumor or cancer, lymphoma, carcinoma, and sarcoma, and a metastatic cancer disease derived from any of the foregoing, with an antibody construct comprising at least one domain which binds to DLL3 on the surface of a target cell, and at least one other domain which binds to CD3, preferably human CD3, on the surface of a T cell according to any one of embodiments (i) to (xiv) of general Aspect A) and according to embodiment (i) of Sub-Aspect B-5, comprising
[0364] (a) administering at least one antibody construct referred to in the preamble, and
[0365] (b) administering an inhibitor/antagonist of TNF/TNFR that reduces TNF/TNFR signaling, wherein said inhibitor/antagonist of TNF/TNFR that reduces TNF/TNFR signaling referred to in (b) is for
   administration to a patient prior to and optionally also following administration of said antibody construct referred to in (a), wherein said antibody construct binds to an epitope that is selectively bound by an antibody/antibody construct that comprises a VH region comprising CDR-H1, CDR-H2 and CDR-H3 and a VL region comprising CDR-L1, CDR-L2 and CDR-L3, which are selected from the group comprising: a) CDR-H1 as depicted in SEQ ID NO: 1040, CDR-H2 as depicted in SEQ ID NO: 1041, CDR-H3 as depicted in SEQ ID NO: 1042, CDR-L1 as depicted in SEQ ID NO: 1043, CDR-L2 as depicted in SEQ ID NO: 1044 and CDR-L3 as depicted in SEQ ID NO: 1045; b) CDR-H1 as depicted in SEQ ID NO: 1046, CDR-H2 as depicted in SEQ ID NO: 1047, CDR-H3 as depicted in SEQ ID NO: 1048, CDR-L1 as depicted in SEQ ID NO: 1049, CDR-L2 as depicted in SEQ ID NO: 1050 and CDR-L3 as depicted in SEQ ID NO: 1051; c) CDR-H1 as depicted in SEQ ID NO: 1052, CDR-H2 as depicted in SEQ ID NO: 1053, CDR-H3 as depicted in SEQ ID NO: 1054, CDR-L1 as depicted in SEQ ID NO: 1055, CDR-L2 as depicted in SEQ ID NO: 1056 and CDR-L3 as depicted in SEQ ID NO: 1057; d) CDR-H1 as depicted in SEQ ID NO: 1058, CDR-H2 as depicted in SEQ ID NO: 1059, CDR-H3 as depicted in SEQ ID NO: 1060, CDR-L1 as depicted in SEQ ID NO: 1061, CDR-L2 as depicted in SEQ ID NO: 1062 and CDR-L3 as depicted in SEQ ID NO: 1063; e) CDR-H1 as depicted in SEQ ID NO: 1064, CDR-H2 as depicted in SEQ ID NO: 1065, CDR-H3 as depicted in SEQ ID NO: 1066, CDR-L1 as depicted in SEQ ID NO: 1067, CDR-L2 as depicted in SEQ ID NO: 1068 and CDR-L3 as depicted in SEQ ID NO: 1069; f) CDR-H1 as depicted in SEQ ID NO: 1070, CDR-H2 as depicted in SEQ ID NO: 1071, CDR-H3 as depicted in SEQ ID NO: 1072, CDR-L1 as depicted in SEQ ID NO: 1073, CDR-L2 as depicted in SEQ ID NO: 1074 and CDR-L3 as depicted in SEQ ID NO: 1075; g) CDR-H1 as depicted in SEQ ID NO: 1076, CDR-H2 as depicted in SEQ ID NO: 1077, CDR-H3 as depicted in SEQ ID NO: 1078, CDR-L1 as depicted in SEQ ID NO: 1079, CDR-L2 as depicted in SEQ ID NO: 1080 and CDR-L3 as depicted in SEQ ID NO: 1081; h) CDR-H1 as depicted in SEQ ID NO: 1082, CDR-H2 as depicted in SEQ ID NO: 1083, CDR-H3 as depicted in SEQ ID NO: 1084, CDR-L1 as depicted in SEQ ID NO: 1085, CDR-L2 as depicted in SEQ ID NO: 1086 and CDR-L3 as depicted in SEQ ID NO: 1087; and i) CDR-H1 as depicted in SEQ ID NO: 1088, CDR-H2 as depicted in SEQ ID NO: 1089, CDR-H3 as depicted in SEQ ID NO: 1090, CDR-L1 as depicted in SEQ ID NO: 1091, CDR-L2 as depicted in SEQ ID NO: 1092 and CDR-L3 as depicted in SEQ ID NO: 1093.
   (iii) The method for the treatment of DLL3+ positive cancers and further for the prevention, prophylaxis, or amelioration of adverse events associated with immunotherapy, wherein the cancer is selected from the group consisting of lung cancer, preferably SCLC, breast, cervical, colon, colorectal, endometrial, head and neck, liver, ovarian, pancreatic, prostate, skin, gastric, testis, thyroid, adrenal, renal, bladder, uterine, esophageal, urothelial and brain tumor or cancer, lymphoma, carcinoma, and sarcoma, and a metastatic cancer disease derived from any of the foregoing, with an antibody construct comprising at least one domain which binds to DLL3 on the surface of a target cell, and at least one other domain which binds to CD3, preferably human CD3, on the surface of a T cell according to any one of embodiments (i) to (xiv) of general Aspect A) and according to embodiments (i) or (ii) of Sub-Aspect B-5, comprising
[0366] (a) administering at least one antibody construct referred to in the preamble, and
[0367] (b) administering an inhibitor/antagonist of TNF/TNFR that reduces TNF/TNFR signaling,
   wherein said inhibitor/antagonist of TNF/TNFR that reduces TNF/TNFR signaling referred to in (b) is for administration to a patient prior to and optionally also following administration of said antibody construct referred to in (a), wherein said antibody construct binds to an epitope that is selectively bound by an antibody/antibody construct that comprises a binding domain comprising a VH region selected from the group comprising those depicted in SEQ ID NO: 1094, SEQ ID NO: 1095, SEQ ID NO: 1096, SEQ ID NO: 1097, SEQ ID NO: 1098, SEQ ID NO: 1099, SEQ ID NO: 1100, SEQ ID NO: 1101, SEQ ID NO: 1102, SEQ ID NO: 1103 and SEQ ID NO: 1104.
   (iv) The method for the treatment of DLL3+ positive cancers and further for the prevention, prophylaxis, or amelioration of adverse events associated with immunotherapy, wherein the cancer is selected from the group consisting of lung cancer, preferably SCLC, breast, cervical, colon, colorectal, endometrial, head and neck, liver, ovarian, pancreatic, prostate, skin, gastric, testis, thyroid, adrenal, renal, bladder, uterine, esophageal, urothelial and brain tumor or cancer, lymphoma, carcinoma, and sarcoma, and a metastatic cancer disease derived from any of the foregoing, with an antibody construct comprising at least one domain which binds to DLL3 on the surface of a target cell, and at least one other domain which binds to CD3, preferably human CD3, on the surface of a T cell according to any one of embodiments (i) to (xiv) of general Aspect A) and according to embodiments (i) to (iii) of Sub-Aspect B-5, comprising
[0368] (a) administering at least one antibody construct referred to in the preamble, and
[0369] (b) administering an inhibitor/antagonist of TNF/TNFR that reduces TNF/TNFR signaling,
   wherein said inhibitor/antagonist of TNF/TNFR that reduces TNF/TNFR signaling referred to in (b) is for administration to a patient prior to and optionally also following administration of said antibody construct referred to in (a), wherein said antibody construct binds to an epitope that is selectively bound by an antibody/antibody construct that comprises a binding domain comprising a VL region selected from the group comprising those depicted in SEQ ID NO: 1105, SEQ ID NO: 1106, SEQ ID NO: 1107, SEQ ID NO: 1108, SEQ ID NO: 1109, SEQ ID NO: 1110, SEQ ID NO: 1111, SEQ ID NO: 1112, SEQ ID NO: 1113, SEQ ID NO: 1114 and SEQ ID NO: 1115.
   (v) The method for the treatment of DLL3+ positive cancers and further for the prevention, prophylaxis, or amelioration of adverse events associated with immunotherapy, wherein the cancer is selected from the group consisting of lung cancer, preferably SCLC, breast, cervical, colon, colorectal, endometrial, head and neck, liver, ovarian, pancreatic, prostate, skin, gastric, testis, thyroid, adrenal, renal, bladder, uterine, esophageal, urothelial and brain tumor or cancer, lymphoma, carcinoma, and sarcoma, and a metastatic cancer disease derived from any of the foregoing, with an antibody construct comprising at least one domain which binds to DLL3 on the surface of a target cell, and at least one other domain which binds to CD3, preferably human CD3, on the surface of a T cell according to any one of embodiments (i) to (xiv) of general Aspect A) and according to embodiments (i) to (iv) of Sub-Aspect B-5, comprising
[0370] (a) administering at least one antibody construct referred to in the preamble, and
[0371] (b) administering an inhibitor/antagonist of TNF/TNFR that reduces TNF/TNFR signaling,
   wherein said inhibitor/antagonist of TNF/TNFR that reduces TNF/TNFR signaling referred to in (b) is for administration to a patient prior to and optionally also following administration of said antibody construct referred to in (a), wherein said antibody construct binds to an epitope that is selectively bound by an antibody/antibody construct that comprises a binding domain comprising a pair of a VH region and a VL region selected from the group consisting of pairs of a VH region and a VL region as depicted in SEQ ID NOs: 1094+1105; SEQ ID NOs: 1095+1106; SEQ ID NOs: 1096+1107; SEQ ID NOs: 1097+1108; SEQ ID NOs: 1098+1109; SEQ ID NOs: 1099+1110; SEQ ID NOs: 1100+1111; SEQ ID NOs: 1101+1112; SEQ ID NOs: 1102+1113; SEQ ID NOs: 1103+1114; and SEQ ID NOs: 1104+1115.
   (vi) The method for the treatment of DLL3+ positive cancers and further for the prevention, prophylaxis, or amelioration of adverse events associated with immunotherapy, wherein the cancer is selected from the group consisting of lung cancer, preferably SCLC, breast, cervical, colon, colorectal, endometrial, head and neck, liver, ovarian, pancreatic, prostate, skin, gastric, testis, thyroid, adrenal, renal, bladder, uterine, esophageal, urothelial and brain tumor or cancer, lymphoma, carcinoma, and sarcoma, and a metastatic cancer disease derived from any of the foregoing, with an antibody construct comprising at least one domain which binds to DLL3 on the surface of a target cell, and at least one other domain which binds to CD3, preferably human CD3, on the surface of a T cell according to any one of embodiments (i) to (xiv) of general Aspect A) and according to embodiments (i) to (v) of Sub-Aspect B-5, comprising
[0372] (a) administering at least one antibody construct referred to in the preamble, and
[0373] (b) administering an inhibitor/antagonist of TNF/TNFR that reduces TNF/TNFR signaling,
   wherein said inhibitor/antagonist of TNF/TNFR that reduces TNF/TNFR signaling referred to in (b) is for administration to a patient prior to and optionally also following administration of said antibody construct referred to in (a), wherein said antibody construct binds to an epitope that is selectively bound by an antibody/antibody construct that comprises a binding domain comprising a polypeptide selected from the group consisting of those depicted in SEQ ID NO: 1116, SEQ ID NO: 1117, SEQ ID NO: 1118, SEQ ID NO: 1119, SEQ ID NO: 1120, SEQ ID NO: 1121, SEQ ID NO: 1122, SEQ ID NO: 1123, SEQ ID NO: 1124, SEQ ID NO: 1125 and SEQ ID NO: 1126.
   (vii) The method for the treatment of DLL3+ positive cancers and further for the prevention, prophylaxis, or amelioration of adverse events associated with immunotherapy, wherein the cancer is selected from the group consisting of lung cancer, preferably SCLC, breast, cervical, colon, colorectal, endometrial, head and neck, liver, ovarian, pancreatic, prostate, skin, gastric, testis, thyroid, adrenal, renal, bladder, uterine, esophageal, urothelial and brain tumor or cancer, lymphoma, carcinoma, and sarcoma, and a metastatic cancer disease derived from any of the foregoing, with an antibody construct comprising at least one domain which binds to DLL3 on the surface of a target cell, and at least one other domain which binds to CD3, preferably human CD3, on the surface of a T cell according to any one of embodiments (i) to (xiv) of general Aspect A) and according to embodiments (i) to (vi) of Sub-Aspect B-5, comprising
[0374] a) administering at least one antibody construct referred to in the preamble, and
[0375] b) administering an inhibitor/antagonist of TNF/TNFR that reduces TNF/TNFR signaling,
   wherein said inhibitor/antagonist of TNF/TNFR that reduces TNF/TNFR signaling referred to in (b) is for administration to a patient prior to and optionally also following administration of said antibody construct referred to in (a), wherein said antibody construct binds to an epitope that is selectively bound by an antibody/antibody construct that comprises a binding domain comprising a polypeptide selected from the group consisting of those depicted in SEQ ID NO: 1127, SEQ ID NO: 1128, SEQ ID NO: 1129, SEQ ID NO: 1130, SEQ ID NO: 1131, SEQ ID NO: 1132, SEQ ID NO: 1133, SEQ ID NO: 1134, SEQ ID NO: 1135, SEQ ID NO: 1136, SEQ ID NO: 1137, SEQ ID NO: 1139, SEQ ID NO: 1140, SEQ ID NO: 1141, SEQ ID NO: 1142, SEQ ID NO: 1143, and SEQ ID NO: 1144.
   (viii) The method for the treatment of DLL3+ positive cancers and further for the prevention, prophylaxis, or amelioration of adverse events associated with immunotherapy, wherein the cancer is selected from the group consisting of lung cancer, preferably SCLC, breast, cervical, colon, colorectal, endometrial, head and neck, liver, ovarian, pancreatic, prostate, skin, gastric, testis, thyroid, adrenal, renal, bladder, uterine, esophageal, urothelial and brain tumor or cancer, lymphoma, carcinoma, and sarcoma, and a metastatic cancer disease derived from any of the foregoing, with an antibody construct comprising at least one domain which binds to DLL3 on the surface of a target cell, and at least one other domain which binds to CD3, preferably human CD3, on the surface of a T cell according to any one of embodiments (i) to (xiv) of general Aspect A) and according to embodiments (i) to (vii) of Sub-Aspect B-5, comprising
[0376] (a) administering at least one antibody construct referred to in the preamble, and
[0377] (b) administering an inhibitor/antagonist of TNF/TNFR that reduces TNF/TNFR signaling,
   wherein said inhibitor/antagonist of TNF/TNFR that reduces TNF/TNFR signaling referred to in (b) is for administration to a patient prior to and optionally also following administration of said antibody construct referred to in (a), wherein said antibody construct binds to an epitope that is selectively bound by an antibody/antibody construct that comprises a binding domain comprising a polypeptide binding domain that binds to an epitope of DLL3 which is comprised within the region as depicted in SEQ ID NO: 1145.
   (ix) The method for the treatment of DLL3+ positive cancers and further for the prevention, prophylaxis, or amelioration of adverse events associated with immunotherapy, wherein the cancer is selected from the group consisting of lung cancer, preferably SCLC, breast, cervical, colon, colorectal, endometrial, head and neck, liver, ovarian, pancreatic, prostate, skin, gastric, testis, thyroid, adrenal, renal, bladder, uterine, esophageal, urothelial and brain tumor or cancer, lymphoma, carcinoma, and sarcoma, and a metastatic cancer disease derived from any of the foregoing, with an antibody construct comprising at least one domain which binds to DLL3 on the surface of a target cell, and at least one other domain which binds to CD3, preferably human CD3, on the surface of a T cell according to any one of embodiments (i) to (xiv) of general Aspect A) and according to embodiments (i) to (iv) of Sub-Aspect B-5, comprising
[0378] (a) administering at least one antibody construct referred to in the preamble, and
[0379] (b) administering an inhibitor/antagonist of TNF/TNFR that reduces TNF/TNFR signaling,
   wherein said inhibitor/antagonist of TNF/TNFR that reduces TNF/TNFR signaling referred to in (b) is for administration to a patient prior to and optionally also following administration of said antibody construct referred to in (a), wherein said antibody construct binds to an epitope that is selectively bound by an antibody/antibody construct that comprises a binding domain comprising a polypeptide binding domain that comprises a VH region comprising CDR-H1, CDR-H2 and CDR-H3 and a VL region comprising CDR-L1, CDR-L2 and CDR-L3 selected from the group consisting of: a) CDR-H1 as depicted in SEQ ID NO: 1146, CDR-H2 as depicted in SEQ ID NO: 1147, CDR-H3 as depicted in SEQ ID NO: 1148, CDR-L1 as depicted in SEQ ID NO: 1149, CDR-L2 as depicted in SEQ ID NO: 1150 and CDR-L3 as depicted in SEQ ID NO: 1151; b) CDR-H1 as depicted in SEQ ID NO: 1152, CDR-H2 as depicted in SEQ ID NO: 1153, CDR-H3 as depicted in SEQ ID NO: 1154, CDR-L1 as depicted in SEQ ID NO: 1155, CDR-L2 as depicted in SEQ ID NO: 1156 and CDR-L3 as depicted in SEQ ID NO: 1157; c) CDR-H1 as depicted in SEQ ID NO: 1158, CDR-H2 as depicted in SEQ ID NO: 1159, CDR-H3 as depicted in SEQ ID NO: 1160, CDR-L1 as depicted in SEQ ID NO: 1161, CDR-L2 as depicted in SEQ ID NO: 1162 and CDR-L3 as depicted in SEQ ID NO: 1163; d) CDR-H1 as depicted in SEQ ID NO: 1164, CDR-H2 as depicted in SEQ ID NO: 1165, CDR-H3 as depicted in SEQ ID NO: 1166, CDR-L1 as depicted in SEQ ID NO: 1167, CDR-L2 as depicted in SEQ ID NO: 1168 and CDR-L3 as depicted in SEQ ID NO: 1169; e) CDR-H1 as depicted in SEQ ID NO: 1170, CDR-H2 as depicted in SEQ ID NO: 1171, CDR-H3 as depicted in SEQ ID NO: 1172, CDR-L1 as depicted in SEQ ID NO: 1173, CDR-L2 as depicted in SEQ ID NO: 1174 and CDR-L3 as depicted in SEQ ID NO: 1175; f) CDR-H1 as depicted in SEQ ID NO: 1152, CDR-H2 as depicted in SEQ ID NO: 1176, CDR-H3 as depicted in SEQ ID NO: 1154, CDR-L1 as depicted in SEQ ID NO: 1155, CDR-L2 as depicted in SEQ ID NO: 1156 and CDR-L3 as depicted in SEQ ID NO: 1157; g) CDR-H1 as depicted in SEQ ID NO: 1152, CDR-H2 as depicted in SEQ ID NO: 1177, CDR-H3 as depicted in SEQ ID NO: 1154, CDR-L1 as depicted in SEQ ID NO: 1155, CDR-L2 as depicted in SEQ ID NO: 1156 and CDR-L3 as depicted in SEQ ID NO: 1157; h) CDR-H1 as depicted in SEQ ID NO: 1152, CDR-H2 as depicted in SEQ ID NO: 1153, CDR-H3 as depicted in SEQ ID NO: 1154, CDR-L1 as depicted in SEQ ID NO: 1178, CDR-L2 as depicted in SEQ ID NO: 1156 and CDR-L3 as depicted in SEQ ID NO: 1157; i) CDR-H1 as depicted in SEQ ID NO: 1152, CDR-H2 as depicted in SEQ ID NO: 1153, CDR-H3 as depicted in SEQ ID NO: 1154, CDR-L1 as depicted in SEQ ID NO: 1179, CDR-L2 as depicted in SEQ ID NO: 1156 and CDR-L3 as depicted in SEQ ID NO: 1157; j) CDR-H1 as depicted in SEQ ID NO: 1152, CDR-H2 as depicted in SEQ ID NO: 1153, CDR-H3 as depicted in SEQ ID NO: 1154, CDR-L1 as depicted in SEQ ID NO: 1180, CDR-L2 as depicted in SEQ ID NO: 1156 and CDR-L3 as depicted in SEQ ID NO: 1157; k) CDR-H1 as depicted in SEQ ID NO: 1152, CDR-H2 as depicted in SEQ ID NO: 1153, CDR-H3 as depicted in SEQ ID NO: 1154, CDR-L1 as depicted in SEQ ID NO: 1181, CDR-L2 as depicted in SEQ ID NO: 1156 and CDR-L3 as depicted in SEQ ID NO: 1157; 1) CDR-H1 as depicted in SEQ ID NO: 1152, CDR-H2 as depicted in SEQ ID NO: 1176, CDR-H3 as depicted in SEQ ID NO: 1154, CDR-L1 as depicted in SEQ ID NO: 1178, CDR-L2 as depicted in SEQ ID NO: 1156 and CDR-L3 as depicted in SEQ ID NO: 1157; and m) CDR-H1 as depicted in SEQ ID NO: 1152, CDR-H2 as depicted in SEQ ID NO: 1177, CDR-H3 as depicted in SEQ ID NO: 1154, CDR-L1 as depicted in SEQ ID NO: 1179, CDR-L2 as depicted in SEQ ID NO: 1156 and CDR-L3 as depicted in SEQ ID NO: 1157.
   (x) The method for the treatment of DLL3+ positive cancers and further for the prevention, prophylaxis, or amelioration of adverse events associated with immunotherapy, wherein the cancer is selected from the group consisting of lung cancer, preferably SCLC, breast, cervical, colon, colorectal, endometrial, head and neck, liver, ovarian, pancreatic, prostate, skin, gastric, testis, thyroid, adrenal, renal, bladder, uterine, esophageal, urothelial and brain tumor or cancer, lymphoma, carcinoma, and sarcoma, and a metastatic cancer disease derived from any of the foregoing, with an antibody construct comprising at least one domain which binds to DLL3 on the surface of a target cell, and at least one other domain which binds to CD3, preferably human CD3, on the surface of a T cell according to any one of embodiments (i) to (xiv) of general Aspect A) and according to embodiments (i) to (ix) of Sub-Aspect B-5, comprising
[0380] (a) administering at least one antibody construct referred to in the preamble, and
[0381] (b) administering an inhibitor/antagonist of TNF/TNFR that reduces TNF/TNFR signaling,
   wherein said inhibitor/antagonist of TNF/TNFR that reduces TNF/TNFR signaling referred to in (b) is for administration to a patient prior to and optionally also following administration of said antibody construct referred to in (a), wherein said antibody construct binds to an epitope that is selectively bound by an antibody/antibody construct comprising a polypeptide a binding domain that comprises a VH region selected from the group consisting of those depicted in SEQ ID NO: 1182, SEQ ID NO: 1183, SEQ ID NO: 1184, SEQ ID NO: 1185, SEQ ID NO: 1186, SEQ ID NO: 1187, SEQ ID NO: 1188, SEQ ID NO: 1189, SEQ ID NO: 1190, SEQ ID NO: 1191, SEQ ID NO: 1192, SEQ ID NO: 1193, SEQ ID NO: 1194, SEQ ID NO: 1195, SEQ ID NO: 1196, and SEQ ID NO: 1197.
   (xi) The method for the treatment of DLL3+ positive cancers and further for the prevention, prophylaxis, or amelioration of adverse events associated with immunotherapy, wherein the cancer is selected from the group consisting of lung cancer, preferably SCLC, breast, cervical, colon, colorectal, endometrial, head and neck, liver, ovarian, pancreatic, prostate, skin, gastric, testis, thyroid, adrenal, renal, bladder, uterine, esophageal, urothelial and brain tumor or cancer, lymphoma, carcinoma, and sarcoma, and a metastatic cancer disease derived from any of the foregoing, with an antibody construct comprising at least one domain which binds to DLL3 on the surface of a target cell, and at least one other domain which binds to CD3, preferably human CD3, on the surface of a T cell according to any one of embodiments (i) to (xiv) of general Aspect A) and according to embodiments (i) to (x) of Sub-Aspect B-5, comprising
[0382] (a) administering at least one antibody construct referred to in the preamble, and
[0383] (b) administering an inhibitor/antagonist of TNF/TNFR that reduces TNF/TNFR signaling,
   wherein said inhibitor/antagonist of TNF/TNFR that reduces TNF/TNFR signaling referred to in (b) is for administration to a patient prior to and optionally also following administration of said antibody construct referred to in (a), wherein said antibody construct binds to an epitope that is selectively bound by an antibody/antibody construct comprising a polypeptide have a binding domain that comprises a VL region selected from the group consisting of those depicted in SEQ ID NO: 1198, SEQ ID NO: 1199, SEQ ID NO: 1200, SEQ ID NO: 1201, SEQ ID NO: 1202, SEQ ID NO: 1203, SEQ ID NO: 1204, SEQ ID NO: 1205, SEQ ID NO: 1206, SEQ ID NO: 1207, SEQ ID NO: 1208, SEQ ID NO: 1209, SEQ ID NO: 1210, SEQ ID NO: 1211, SEQ ID NO: 1212, SEQ ID NO: 1213, SEQ ID NO: 1214, SEQ ID NO: 1215, SEQ ID NO: 1216, and SEQ ID NO: 1217.
   (xii) The method for the treatment of DLL3+ positive cancers and further for the prevention, prophylaxis, or amelioration of adverse events associated with immunotherapy, wherein the cancer is selected from the group consisting of lung cancer, preferably SCLC, breast, cervical, colon, colorectal, endometrial, head and neck, liver, ovarian, pancreatic, prostate, skin, gastric, testis, thyroid, adrenal, renal, bladder, uterine, esophageal, urothelial and brain tumor or cancer, lymphoma, carcinoma, and sarcoma, and a metastatic cancer disease derived from any of the foregoing, with an antibody construct comprising at least one domain which binds to DLL3 on the surface of a target cell, and at least one other domain which binds to CD3, preferably human CD3, on the surface of a T cell according to any one of embodiments (i) to (xiv) of general Aspect A) and according to embodiments (i) to (xi) of Sub-Aspect B-5, comprising
[0384] (a) administering at least one antibody construct referred to in the preamble, and
[0385] (b) administering an inhibitor/antagonist of TNF/TNFR that reduces TNF/TNFR signaling,
   wherein said inhibitor/antagonist of TNF/TNFR that reduces TNF/TNFR signaling referred to in (b) is for administration to a patient prior to and optionally also following administration of said antibody construct referred to in (a), wherein said antibody construct binds to an epitope that is selectively bound by an antibody/antibody construct n comprising a polypeptide that comprises a VH region and a VL region selected from the group consisting of pairs of a VH region and a VL region as depicted in SEQ ID NOs: 1182+1198; SEQ ID NOs: 1183+1199; SEQ ID NOs: 1184+1200; SEQ ID NOs: 1185+1201; SEQ ID NOs: 1186+1202; SEQ ID NOs 1183+1203; SEQ ID NOs 1183+1204; SEQ ID NOs 1183+1206; SEQ ID NOs 1183+1206; SEQ ID NOs 1183+1207; SEQ ID NOs 1187+1199; SEQ ID NOs 1188+1199; SEQ ID NOs 1189+1199; SEQ ID NOs 1187+1207; SEQ ID NOs 1190+1208; 1191+1209; SEQ ID NOs 1191+1209; SEQ ID NOs 1192+1210; SEQ ID NOs 1192+1211; SEQ ID NOs 1192+1212; SEQ ID NOs 1192+1213; SEQ ID NOs 1192+1214; SEQ ID NOs 1192+1215; SEQ ID NOs 1193+1210; SEQ ID NOs 1194+1210; SEQ ID NOs 1195+1210; SEQ ID NOs 1193+1215; SEQ ID NOs 1196+1216; and SEQ ID NOs 1197+1217.
   (xiii) The method for the treatment of DLL3+ positive cancers and further for the prevention, prophylaxis, or amelioration of adverse events associated with immunotherapy, wherein the cancer is selected from the group consisting of lung cancer, preferably SCLC, breast, cervical, colon, colorectal, endometrial, head and neck, liver, ovarian, pancreatic, prostate, skin, gastric, testis, thyroid, adrenal, renal, bladder, uterine, esophageal, urothelial and brain tumor or cancer, lymphoma, carcinoma, and sarcoma, and a metastatic cancer disease derived from any of the foregoing, with an antibody construct comprising at least one domain which binds to DLL3 on the surface of a target cell, and at least one other domain which binds to CD3, preferably human CD3, on the surface of a T cell according to any one of embodiments (i) to (xiv) of general Aspect A) and according to embodiments (i) to (xii) of Sub-Aspect B-5, comprising
[0386] (a) administering at least one antibody construct referred to in the preamble, and
[0387] (b) administering an inhibitor/antagonist of TNF/TNFR that reduces TNF/TNFR signaling,
   wherein said inhibitor/antagonist of TNF/TNFR that reduces TNF/TNFR signaling referred to in (b) is for administration to a patient prior to and optionally also following administration of said antibody construct referred to in (a), wherein said antibody construct binds to an epitope that is selectively bound by an antibody/antibody construct that comprises a binding domain comprising a polypeptide selected from the group consisting of those depicted in SEQ ID NO: 1218, SEQ ID NO: 1219, SEQ ID NO: 1220, SEQ ID NO: 1221, SEQ ID NO: 1222, SEQ ID NO: 1223, SEQ ID NO: 1224, SEQ ID NO: 1225, SEQ ID NO: 1226, SEQ ID NO: 1227, SEQ ID NO: 1228, SEQ ID NO: 1229, SEQ ID NO: 1230, SEQ ID NO: 1231, SEQ ID NO: 1232, SEQ ID NO: 1233, SEQ ID NO: 1234, SEQ ID NO: 1235, SEQ ID NO: 1236, SEQ ID NO: 1237, SEQ ID NO: 1238, SEQ ID NO: 1239, SEQ ID NO: 1240, SEQ ID NO: 1241, SEQ ID NO: 1242, SEQ ID NO: 1243, SEQ ID NO: 1244, and SEQ ID NO: 1245.
   (xiv) The method for the treatment of DLL3+ positive cancers and further for the prevention, prophylaxis, or amelioration of adverse events associated with immunotherapy, wherein the cancer is selected from the group consisting of lung cancer, preferably SCLC, breast, cervical, colon, colorectal, endometrial, head and neck, liver, ovarian, pancreatic, prostate, skin, gastric, testis, thyroid, adrenal, renal, bladder, uterine, esophageal, urothelial and brain tumor or cancer, lymphoma, carcinoma, and sarcoma, and a metastatic cancer disease derived from any of the foregoing, with an antibody construct comprising at least one domain which binds to DLL3 on the surface of a target cell, and at least one other domain which binds to CD3, preferably human CD3, on the surface of a T cell according to any one of embodiments (i) to (xiv) of general Aspect A) and according to embodiments (i) to (xiii) of Sub-Aspect B-5, comprising
[0388] (a) administering at least one antibody construct referred to in the preamble, and
[0389] (b) administering an inhibitor/antagonist of TNF/TNFR that reduces TNF/TNFR signaling,
   wherein said inhibitor/antagonist of TNF/TNFR that reduces TNF/TNFR signaling referred to in (b) is for administration to a patient prior to and optionally also following administration of said antibody construct referred to in (a), wherein said antibody construct binds to an epitope that is selectively bound by an antibody/antibody construct comprising a polypeptide selected from the group consisting of those depicted in SEQ ID NO: 1246, SEQ ID NO: 1247, SEQ ID NO: 1248, SEQ ID NO: 1249, SEQ ID NO: 1250; SEQ ID NO: 1251, SEQ ID NO: 1252, SEQ ID NO: 1253, SEQ ID NO: 1254, SEQ ID NO: 1255, SEQ ID NO: 1256, SEQ ID NO: 1257, SEQ ID NO: 1258, SEQ ID NO: 1259, SEQ ID NO: 1260, SEQ ID NO: 1261, SEQ ID NO: 1262, SEQ ID NO: 1263, SEQ ID NO: 1264, SEQ ID NO: 1265, SEQ ID NO: 1266, SEQ ID NO: 1267, SEQ ID NO: 1268, SEQ ID NO: 1269, SEQ ID NO: 1270, SEQ ID NO: 1271, SEQ ID NO: 1272, SEQ ID NO: 1273, SEQ ID NO: 1274, SEQ ID NO: 1275, and SEQ ID NO: 1276.
   (xv) The method for the treatment of DLL3+ positive cancers and further for the prevention, prophylaxis, or amelioration of adverse events associated with immunotherapy, wherein the cancer is selected from the group consisting of lung cancer, preferably SCLC, breast, cervical, colon, colorectal, endometrial, head and neck, liver, ovarian, pancreatic, prostate, skin, gastric, testis, thyroid, adrenal, renal, bladder, uterine, esophageal, urothelial and brain tumor or cancer, lymphoma, carcinoma, and sarcoma, and a metastatic cancer disease derived from any of the foregoing, with an antibody construct comprising at least one domain which binds to DLL3 on the surface of a target cell, and at least one other domain which binds to CD3, preferably human CD3, on the surface of a T cell according to any one of embodiments (i) to (xiv) of general Aspect A) and according to embodiments (i) to (xiv) of Sub-Aspect B-5, comprising
[0390] (a) administering at least one antibody construct referred to in the preamble, and
[0391] (b) administering an inhibitor/antagonist of TNF/TNFR that reduces TNF/TNFR signaling,
   wherein said inhibitor/antagonist of TNF/TNFR that reduces TNF/TNFR signaling referred to in (b) is for administration to a patient prior to and optionally also following administration of said antibody construct referred to in (a), wherein said antibody construct binds to an epitope that is selectively bound by an antibody/antibody construct that comprises a binding domain comprising binding domain comprising or consisting of a polypeptide selected from the group consisting of those depicted in SEQ ID NO: 1277, SEQ ID NO: 1278, SEQ ID NO: 1279, SEQ ID NO: 1280, SEQ ID NO: 1281, SEQ ID NO: 1282, SEQ ID NO: 1283, SEQ ID NO: 1284.

### Aspect C)—Kits

[0392] The present invention relates also to a kit comprising a combination product as defined in any of the preceding embodiments (i) to (xiv) of general Aspect A), or according to any of the embodiments of any of the foregoing Sub-Aspects A-1 to A-5, in a package, wherein the combination product is present in a single container, or the components of said combination product are present individually, said kit optionally also further comprising at least one of a group comprising instructions for use, a device for administration of said combination product or a component thereof, at least one separately packed medium for reconstitution, a pharmaceutical carrier for at least one of said combination products or components thereof.

### Aspect D)—Products for Use in Preventive, Prophylactic, Therapeutic Methods

[0393] The present invention relates also to an antibody construct, which may be part of a combination product as defined in any of the preceding embodiments (i) to (xiv) of general Aspect A) or according to any of the embodiments of any of the foregoing Sub-Aspects A-1 to A-5, for the use in a method of preventing, prophylaxis, therapeutic treatment, amelioration or alleviation of cancer, further particularly of adverse events associated with immunotherapy, very particularly of cancer immunotherapy according to any of the methods as defined explicitly in Aspect B, particularly in Sub-Aspects B-1 to B5, which comprise an inhibitor/antagonist of TNF/TNFR that reduces TNF/TNFR signaling as defined in any of the foregoing embodiments (i) to (xiv) of Aspect A), wherein said inhibitor/antagonist of TNF/TNFR that reduces TNF/TNFR signaling is for the prevention of CRS in a patient suffering from a neoplastic disease, and wherein said inhibitor/antagonists is for administration prior to and optionally also following administration of an immunotherapeutic antibody construct as defined herein.

[0394] The present invention relates also to the inhibitor/antagonist of TNF/TNFR that reduces TNF/TNFR signaling which may be part of a combination product as defined in any of the preceding embodiments (i) to (xiv) of general Aspect A) or according to any of the embodiments of any of the foregoing Sub-Aspects A-1 to A-5, for the use in a method of treatment of cancer and particularly for preventing, prophylaxis, amelioration or alleviation of adverse events associated with immunotherapy, very particularly of cancer immunotherapy according to any of the methods as defined explicitly in Aspect B, particularly in Sub-Aspects B-1 to B5, particularly for use in the prevention or prophylaxis of CRS in a patient suffering from a neoplastic disease as defined in the preceding embodiment, and/or wherein said patient is at risk of developing CRS.

[0395] The present invention relates also to the inhibitor/antagonist of TNF/TNFR that reduces TNF/TNFR signaling which may be part of a combination product as defined in any of the preceding embodiments (i) to (xiv) of general Aspect A) or according to any of the embodiments of any of the foregoing Sub-Aspects A-1 to A-5, for the use in a method of treatment of cancer and particularly for preventing, prophylaxis, amelioration or alleviation of adverse events associated with immunotherapy, very particularly of cancer immunotherapy according to any of the methods as defined explicitly in Aspect B, particularly in Sub-Aspects B-1 to B5, particularly for use in the prevention of CRS in a patient suffering from a neoplastic disease who is at risk of developing CRS as defined in the preceding embodiments, wherein said patient is a person subjected to therapy with an antibody construct comprising a first domain which binds to a target antigen on the surface of a target cell, and a second domain which binds to CD3, preferably human CD3, on the surface of a T cell as defined in any of the foregoing embodiments, wherein the target antigen is selected from the group as defined supra, i.e. comprising the antigens CD19, CD33, FLT3, PSMA, and DLL3.

### Aspect E)—Second Medical Uses

[0396] The present invention relates also to the use of an inhibitor/antagonist of TNF/TNFR that reduces TNF/TNFR signaling as defined in any of the foregoing embodiments (i) to (xiv) of general Aspect A), and in each and any of the Sub-Aspects A-1 to A-5, and/or in each and any one of Aspect B, particularly in Sub-Aspects B-1 to B-5, for the preparation of a medicament for the treatment or prevention of CRS in a patient suffering from a neoplastic disease, particularly in a patient suffering from a neoplastic disease who is treated with an antibody construct as defined above, i.e. patient is a person subjected to therapy with an antibody construct comprising a first domain which binds to a target antigen on the surface of a target cell, and a second domain which binds to CD3, preferably human CD3, on the surface of a T cell as defined in any of the foregoing embodiments, wherein the target antigen is selected from the group as defined supra, i.e. comprising the antigens CD19, CD33, FLT3, PSMA, and DLL3.

### Aspect F)—Dosing

[0397] The present invention relates also to a method/a use of an inhibitor/antagonist of TNF/TNFR that reduces TNF/TNFR signaling as defined in any of the foregoing embodiments (i) to (xiv) in general Aspect A in the treatment of cancer and particularly for the prevention or prophylaxis, the amelioration and alleviation of adverse events associated with immunotherapy, particularly of cancer immunotherapy, very particularly wherein the adverse event is CRS or TLS, in accordance with any of the methods as defined explicitly in Aspect B, particularly in Sub-Aspects B-1 to B5, in a patient suffering from a neoplastic disease and who is at risk of CRS as defined in the preceding embodiments, wherein said patient is a person subjected to therapy with an antibody construct comprising a first domain which binds to a target antigen on the surface of a target cell, and a second domain which binds to CD3, preferably human CD3, on the surface of a T cell as defined in any of the foregoing embodiments, wherein a first dose of said inhibitor is administered before administration of a first dose of said antibody construct and optionally also following administration of said first dose.

[0398] The present invention relates also to a method/a use of an inhibitor/antagonist of TNF/TNFR that reduces TNF/TNFR signaling as defined in any of the foregoing embodiments (i) to (xiv) in general Aspect A in the treatment of cancer and particularly for the prevention or prophylaxis, the amelioration and alleviation of adverse events associated with immunotherapy, particularly of cancer immunotherapy, very particularly wherein the adverse event is CRS or TLS, in accordance with any of the methods as defined explicitly in Aspect B, particularly in Sub-Aspects B-1 to B5, in a patient suffering from a neoplastic disease and who is at risk of CRS as defined in the preceding embodiments, wherein said patient is a person subjected to therapy with an antibody construct comprising a first domain which binds to a target antigen on the surface of a target cell, and a second domain which binds to CD3, preferably human CD3, on the surface of a T cell as defined in any of the foregoing embodiments, wherein a first dose of said inhibitor is administered before administration of a first dose of said antibody construct and optionally also following administration of said first dose, and wherein said antibody construct binds to a target selected from the group comprising CD19, CD33, FLT3, PSMA, and DLL3.

Sub-Aspect F-1—Dosing of an TNF/TNFR Inhibitor/Antagonist Together with Antibody Constructs Binding CD19

[0399] The present invention relates also to a method/a use of an inhibitor/antagonist of TNF/TNFR that reduces TNF/TNFR signaling as defined in any of the foregoing embodiments (i) to (xiv) in general Aspect A in the immunotherapeutic treatment of cancer and for the prevention of adverse events associated with immunotherapy, particularly of cancer immunotherapy, very particularly wherein the adverse event is CRS, in accordance with any of the methods as defined explicitly in Aspect B, particularly in Sub-Aspect B-1, in a patient suffering from a neoplastic disease, particularly of a blood cancer, such as a leukemia, particularly of ALL, and who is at risk of CRS as defined in the preceding embodiments, wherein said patient is a person subjected to therapy with an antibody construct comprising a first domain which binds to a target antigen on the surface of a target cell, and a second domain which binds to CD3, preferably human CD3, on the surface of a T cell as defined in any of the foregoing embodiments, wherein a first dose of said inhibitor is administered before administration of a first dose of said antibody construct, and wherein said antibody construct binds CD19.

[0400] The present invention relates also to a method/a use of an inhibitor/antagonist of TNF/TNFR that reduces TNF/TNFR signaling as defined in any of the foregoing embodiments (i) to (xiv) in general Aspect A in the immunotherapeutic treatment of cancer and for the prevention, prophylaxis, alleviation or reduction of adverse events associated with immunotherapy, particularly of cancer immunotherapy, very particularly wherein the adverse event is CRS, in accordance with any of the methods as defined explicitly in Aspect B, particularly in Sub-Aspect B-1, in a patient suffering from a neoplastic disease, particularly of a blood cancer, such as a leukemia, particularly of ALL, and who is at risk of CRS as defined in the preceding embodiments, wherein said patient is a person subjected to therapy with an antibody construct comprising a first domain which binds to a target antigen on the surface of a target cell, and a second domain which binds to CD3, preferably human CD3, on the surface of a T cell as defined in any of the foregoing embodiments, wherein a first dose of said inhibitor is administered before administration of a first dose of said antibody construct and optionally also after administration of said first dose or any other dose, and wherein said antibody construct binds CD19, wherein the method may be further defined as in the following embodiments:

(i) A method/a use of an inhibitor/antagonist of TNF/TNFR that reduces TNF/TNFR signaling as defined in any of the foregoing embodiments (i) to (xiv) in general Aspect A in the immunotherapeutic treatment of cancer and for the prevention, prophylaxis, alleviation or reduction of adverse events associated with immunotherapy, more particularly of CD19+ target cells, such as leukemia and/or lymphoma, particularly of ALL, wherein said method comprises the steps:
[0401] (a) Administering an inhibitor/antagonist of TNF/TNFR reducing TNF/TNFR signaling as defined in any of the foregoing sections,
[0402] (b) Administering an antibody construct that binds CD19 on a target cell and CD3 on a T cell, wherein a first dose of said inhibitor is administered before administration of a first dose of said antibody construct.
   (ii) The method/a use of an inhibitor/antagonist of TNF/TNFR that reduces TNF/TNFR signaling as defined in any of the foregoing embodiments (i) to (xiv) in general Aspect A in the immunotherapeutic treatment of cancer, more particularly of CD19+ target cells, such as leukemia and/or lymphoma, particularly of ALL, according to embodiment (i), wherein said method comprises the steps:
[0403] (a) Administering an inhibitor/antagonist of TNF/TNF-Receptor reducing TNF/TNF-Receptor signaling as defined in any of the foregoing sections,
[0404] (b) Administering an antibody construct that binds CD19 on a target cell and CD3 on a T cell,
   wherein said method comprises the prevention, prophylaxis, amelioration, reduction and/or alleviation of adverse events associated with immunotherapy, particularly of cancer immunotherapy, more particularly of cytokine release syndrome (CRS) in a patient suffering from a cancer disease as defined in the preceding embodiment, particularly in a patient at risk of developing CRS.
   (iii) The method/a use of an inhibitor/antagonist of TNF/TNFR that reduces TNF/TNFR signaling as defined in any of the foregoing embodiments (i) to (xiv) in general Aspect A in the immunotherapeutic treatment of cancer, more particularly of CD19+ target cells, such as leukemia and/or lymphoma, particularly of ALL, according to any one of embodiments (i) and (ii), wherein said method comprises the steps:
[0405] (a) Administering an inhibitor/antagonist of TNF/TNF-Receptor reducing TNF/TNF-Receptor signaling as defined in any of the foregoing sections,
[0406] (b) Administering an antibody construct that binds CD19 on a target cell and CD3 on a T cell,
   wherein said method comprises the prevention, prophylaxis, amelioration, reduction and/or alleviation of adverse events associated with immunotherapy, particularly of cancer immunotherapy, more particularly of cytokine release syndrome (CRS) in a patient suffering from a cancer disease as defined in the preceding embodiment, particularly in a patient at risk of developing CRS, wherein at least one further dose, for example a second dose, of said inhibitor is administered before administration of said antibody construct.
   (iv) The method/a use of an inhibitor/antagonist of TNF/TNFR that reduces TNF/TNFR signaling as defined in any of the foregoing embodiments (i) to (xiv) in general Aspect A in the immunotherapeutic treatment of cancer, more particularly of CD19+ target cells, such as leukemia and/or lymphoma, particularly of ALL, according to any one of embodiments (i) to (iii), wherein said method comprises the steps:
[0407] (a) Administering an inhibitor/antagonist of TNF/TNF-Receptor reducing TNF/TNF-Receptor signaling as defined in any of the foregoing sections,
[0408] (b) Administering an antibody construct that binds CD19 on a target cell and CD3 on a T cell,
   wherein said method comprises the prevention, prophylaxis, amelioration, reduction and/or alleviation of adverse events associated with immunotherapy, particularly of cancer immunotherapy, more particularly of cytokine release syndrome (CRS) in a patient suffering from a cancer disease as defined in the preceding embodiment, particularly in a patient at risk of developing CRS, wherein a first dose, optionally also at least one further dose, of said inhibitor is administered before administration of said antibody construct, and wherein a further dose of said inhibitor is administered following administration of said antibody construct.
   (v) The method/a use of an inhibitor/antagonist of TNF/TNFR that reduces TNF/TNFR signaling as defined in any of the foregoing embodiments (i) to (xiv) in general Aspect A in the immunotherapeutic treatment of cancer, more particularly of CD19+ target cells, such as leukemia and/or lymphoma, particularly of ALL, according to any one of embodiments (i) to (iv), wherein said method comprises the steps:
[0409] (a) Administering an inhibitor/antagonist of TNF/TNF-Receptor reducing TNF/TNF-Receptor signaling as defined in any of the foregoing sections,
[0410] (b) Administering an antibody construct that binds CD19 on a target cell and CD3 on a T cell,
   wherein said method comprises the prevention, prophylaxis, amelioration, reduction and/or alleviation of adverse events associated with immunotherapy, particularly of cancer immunotherapy, more particularly of cytokine release syndrome (CRS) in a patient suffering from a neoplastic disease as defined in the preceding embodiment, particularly in a patient at risk of developing CRS, wherein a first dose, optionally also at least one further dose, of said inhibitor is administered before administration of said antibody construct, and wherein further dose of said inhibitor is administered following administration of said antibody construct, wherein the first dose of said inhibitor is administered within a first period before administration of the antibody construct, wherein optionally also said further dose of said inhibitor is administered within a second period before administration of the antibody construct, wherein another dose of said inhibitor is administered within a third period following administration of said antibody construct.
   (vi) The method/a use of an inhibitor/antagonist of TNF/TNFR that reduces TNF/TNFR signaling as defined in any of the foregoing embodiments (i) to (xiv) in general Aspect A in the immunotherapeutic treatment of cancer, more particularly of CD19+ target cells, such as leukemia and/or lymphoma, particularly of ALL, according to any one of embodiments (i) to (v), wherein said method comprises the steps:
[0411] (a) Administering an inhibitor/antagonist of TNF/TNF-Receptor reducing TNF/TNF-Receptor signaling as defined in any of the foregoing sections,
[0412] (b) Administering an antibody construct that binds CD19 on a target cell and CD3 on a T cell,
   wherein said method comprises the prevention, prophylaxis, amelioration, reduction and/or alleviation of adverse events associated with immunotherapy, particularly of cancer immunotherapy, more particularly of cytokine release syndrome (CRS) in a patient suffering from a neoplastic disease as defined in the preceding embodiment, particularly in a patient at risk of developing CRS, wherein a first dose, optionally also at least one further dose, of said inhibitor is administered before administration of said antibody construct, and wherein further dose of said inhibitor is administered following administration of said antibody construct, wherein the first dose of said inhibitor is administered within a first period before administration of the antibody construct, wherein optionally also said further dose of said inhibitor is administered within a second period before administration of the antibody construct,
   wherein another dose of said inhibitor is administered within a third period following administration of said antibody construct, wherein the first dose of said inhibitor is administered within a first period before administration of the antibody construct, said period ranging from 30 minutes to 7 days prior to administration of the antibody construct.
   (vii) The method/a use of an inhibitor/antagonist of TNF/TNFR that reduces TNF/TNFR signaling as defined in any of the foregoing embodiments (i) to (xiv) in general Aspect A in the immunotherapeutic treatment of cancer, more particularly of CD19+ target cells, such as leukemia and/or lymphoma, particularly of ALL, according to any one of embodiments (i) to (vi), wherein said method comprises the steps:
[0413] (a) Administering an inhibitor/antagonist of TNF/TNF-Receptor reducing TNF/TNF-Receptor signaling as defined in any of the foregoing sections,
[0414] (b) Administering an antibody construct that binds CD19 on a target cell and CD3 on a T cell,
   wherein said method comprises the prevention, prophylaxis, amelioration, reduction and/or alleviation of adverse events associated with immunotherapy, particularly of cancer immunotherapy, more particularly of cytokine release syndrome (CRS) in a patient suffering from a neoplastic disease as defined in the preceding embodiment, particularly in a patient at risk of developing CRS, wherein a first dose, optionally also at least one further dose, of said inhibitor is administered before administration of said antibody construct, and wherein further dose of said inhibitor is administered following administration of said antibody construct, wherein the first dose of said inhibitor is administered within a first period before administration of the antibody construct, wherein optionally also said further dose of said inhibitor is administered within a second period before administration of the antibody construct, wherein another dose of said inhibitor is administered within a third period following administration of said antibody construct, wherein the first dose of said inhibitor is administered within a first period before administration of the antibody construct, said period ranging from 30 minutes to 6 days prior to administration of the antibody construct.
   (viii) The method/a use of an inhibitor/antagonist of TNF/TNFR that reduces TNF/TNFR signaling as defined in any of the foregoing embodiments (i) to (xiv) in general Aspect A in the immunotherapeutic treatment of cancer, more particularly of CD19+ target cells, such as leukemia and/or lymphoma, particularly of ALL, according to any one of embodiments (i) to (vii), wherein said method comprises the steps:
[0415] (a) Administering an inhibitor/antagonist of TNF/TNF-Receptor reducing TNF/TNF-Receptor signaling as defined in any of the foregoing sections,
[0416] (b) Administering an antibody construct that binds CD19 on a target cell and CD3 on a T cell,
   wherein said method comprises the prevention, prophylaxis, amelioration, reduction and/or alleviation of adverse events associated with immunotherapy, particularly of cancer immunotherapy, more particularly of cytokine release syndrome (CRS) in a patient suffering from a neoplastic disease as defined in the preceding embodiment, particularly in a patient at risk of developing CRS, wherein a first dose, optionally also at least one further dose, of said inhibitor is administered before administration of said antibody construct, and wherein further dose of said inhibitor is administered following administration of said antibody construct, wherein the first dose of said inhibitor is administered within a first period before administration of the antibody construct, wherein optionally also said further dose of said inhibitor is administered within a second period before administration of the antibody construct, wherein another dose of said inhibitor is administered within a third period following administration of said antibody construct, wherein the first dose of said inhibitor is administered within a first period before administration of the antibody construct, said period ranging from 30 minutes to 5 days prior to administration of the antibody construct.
   (ix) The method/a use of an inhibitor/antagonist of TNF/TNFR that reduces TNF/TNFR signaling as defined in any of the foregoing embodiments (i) to (xiv) in general Aspect A in the immunotherapeutic treatment of cancer, more particularly of CD19+ target cells, such as leukemia and/or lymphoma, particularly of ALL, according to any one of embodiments (i) to (viii), wherein said method comprises the steps:
[0417] (a) Administering an inhibitor/antagonist of TNF/TNF-Receptor reducing TNF/TNF-Receptor signaling as defined in any of the foregoing sections,
[0418] (b) Administering an antibody construct that binds CD19 on a target cell and CD3 on a T cell,
   wherein said method comprises the prevention, prophylaxis, amelioration, reduction and/or alleviation of adverse events associated with immunotherapy, particularly of cancer immunotherapy, more particularly of cytokine release syndrome (CRS) in a patient suffering from a neoplastic disease as defined in the preceding embodiment, particularly in a patient at risk of developing CRS, wherein a first dose, optionally also at least one further dose, of said inhibitor is administered before administration of said antibody construct, and wherein further dose of said inhibitor is administered following administration of said antibody construct, wherein the first dose of said inhibitor is administered within a first period before administration of the antibody construct, wherein optionally also said further dose of said inhibitor is administered within a second period before administration of the antibody construct, wherein another dose of said inhibitor is administered within a third period following administration of said antibody construct, wherein the first dose of said inhibitor is administered within a first period before administration of the antibody construct, said period ranging from 30 minutes to 4 days prior to administration of the antibody construct.
   (x) The method of treating cancer with an antibody construct as defined above, particularly with a cancer immunotherapy, more particularly of CD19+ target cells, such as leukemia and/or lymphoma, particularly ALL, according to any one of embodiments (i) to (ix), wherein said method comprises the steps:
[0419] (a) Administering an inhibitor/antagonist of TNF/TNFR reducing TNF/TNFR signaling as defined in any of the foregoing sections,
[0420] (b) Administering an antibody construct that binds CD19 on a target cell and CD3 on a T cell,
   wherein said method comprises the prevention, prophylaxis, amelioration, reduction and/or alleviation of adverse events associated with immunotherapy, particularly of cancer immunotherapy, more particularly of cytokine release syndrome (CRS) in a patient suffering from a neoplastic disease as defined in the preceding embodiment, particularly in a patient at risk of developing CRS wherein a first dose, optionally also at least one further dose, of said inhibitor is administered before administration of said antibody construct, and wherein further dose of said inhibitor is administered following administration of said antibody construct, wherein the first dose of said inhibitor is administered within a first period before administration of the antibody construct, wherein optionally also said further dose of said inhibitor is administered within a second period before administration of the antibody construct, wherein another dose of said inhibitor is administered within a third period following administration of said antibody construct, wherein the first dose of said inhibitor is administered within a first period before administration of the antibody construct, said period ranging from 30 minutes to 3 days prior to administration of the antibody construct.
   (xi) The method/a use of an inhibitor/antagonist of TNF/TNFR that reduces TNF/TNFR signaling as defined in any of the foregoing embodiments (i) to (xiv) in general Aspect A in the immunotherapeutic treatment of cancer, more particularly of CD19+ target cells, such as leukemia and/or lymphoma, particularly of ALL, according to any one of embodiments (i) to (x), wherein said method comprises the steps:
[0421] (a) Administering an inhibitor/antagonist of TNF/TNF-Receptor reducing TNF/TNF-Receptor signaling as defined in any of the foregoing sections,
[0422] (b) Administering an antibody construct that binds CD19 on a target cell and CD3 on a T cell,
   wherein said method comprises the prevention, prophylaxis, amelioration, reduction and/or alleviation of adverse events associated with immunotherapy, particularly of cancer immunotherapy, more particularly of cytokine release syndrome (CRS) in a patient suffering from a neoplastic disease as defined in the preceding embodiment, particularly in a patient at risk of developing CRS, wherein a first dose, optionally also at least one further dose, of said inhibitor is administered before administration of said antibody construct, and wherein further dose of said inhibitor is administered following administration of said antibody construct, wherein the first dose of said inhibitor is administered within a first period before administration of the antibody construct, wherein optionally also said further dose of said inhibitor is administered within a second period before administration of the antibody construct, wherein another dose of said inhibitor is administered within a third period following administration of said antibody construct, wherein the first dose of said inhibitor is administered within a first period before administration of the antibody construct, said period ranging from 30 minutes to 2 days prior to administration of the antibody construct.
   (xii) The method/a use of an inhibitor/antagonist of TNF/TNFR that reduces TNF/TNFR signaling as defined in any of the foregoing embodiments (i) to (xiv) in general Aspect A in the immunotherapeutic treatment of cancer, more particularly of CD19+ target cells, such as leukemia and/or lymphoma, particularly of ALL, according to any one of embodiments (i) to (xi), wherein said method comprises the steps:
[0423] (a) Administering an inhibitor/antagonist of TNF/TNF-Receptor reducing TNF/TNF-Receptor signaling as defined in any of the foregoing sections,
[0424] (b) Administering an antibody construct that binds CD19 on a target cell and CD3 on a T cell,
   wherein said method comprises the prevention, prophylaxis, amelioration, reduction and/or alleviation of adverse events associated with immunotherapy, particularly of cancer immunotherapy, more particularly of cytokine release syndrome (CRS) in a patient suffering from a neoplastic disease as defined in the preceding embodiment, particularly in a patient at risk of developing CRS, wherein a first dose, optionally also at least one further dose, of said inhibitor is administered before administration of said antibody construct, and wherein further dose of said inhibitor is administered following administration of said antibody construct, wherein the first dose of said inhibitor is administered within a first period before administration of the antibody construct, wherein optionally also said further dose of said inhibitor is administered within a second period before administration of the antibody construct, wherein another dose of said inhibitor is administered within a third period following administration of said antibody construct, wherein the first dose of said inhibitor is administered within a first period before administration of the antibody construct, said period ranging from 30 minutes to 1 day prior to administration of the antibody construct.
   (xiii) The method/a use of an inhibitor/antagonist of TNF/TNFR that reduces TNF/TNFR signaling as defined in any of the foregoing embodiments (i) to (xiv) in general Aspect A in the immunotherapeutic treatment of cancer, more particularly of CD19+ target cells, such as leukemia and/or lymphoma, particularly of ALL, according to any one of embodiments (i) to (xii), wherein said method comprises the steps:
[0425] (a) Administering an inhibitor/antagonist of TNF/TNF-Receptor reducing TNF/TNF-Receptor signaling as defined in any of the foregoing sections,
[0426] (b) Administering an antibody construct that binds CD19 on a target cell and CD3 on a T cell,
   wherein said method comprises the prevention, prophylaxis, amelioration, reduction and/or alleviation of adverse events associated with immunotherapy, particularly of cancer immunotherapy, more particularly of cytokine release syndrome (CRS) in a patient suffering from a neoplastic disease as defined in the preceding embodiment, particularly in a patient at risk of developing CRS, wherein a first dose, optionally also at least one further dose, of said inhibitor is administered before administration of said antibody construct, and wherein at least one further dose of said inhibitor is administered following administration of said antibody construct, wherein the first dose of said inhibitor is administered within a first period before administration of the antibody construct, wherein optionally also said further dose of said inhibitor is administered within a second period before administration of the antibody construct, wherein another dose of said inhibitor is administered within a third period following administration of said antibody construct, wherein the first dose of said inhibitor is administered within a first period before administration of the antibody construct, said period ranging from 60 minutes to 1 day prior to administration of the antibody construct.
   (xiv) The method/a use of an inhibitor/antagonist of TNF/TNFR that reduces TNF/TNFR signaling as defined in any of the foregoing embodiments (i) to (xiv) in general Aspect A in the immunotherapeutic treatment of cancer, more particularly of CD19+ target cells, such as leukemia and/or lymphoma, particularly of ALL, according to any one of embodiments (i) to (xii), wherein said method comprises the steps:
[0427] (a) Administering an inhibitor/antagonist of TNF/TNF-Receptor reducing TNF/TNF-Receptor signaling as defined in any of the foregoing sections,
[0428] (b) Administering an antibody construct that binds CD19 on a target cell and CD3 on a T cell,
   wherein said method comprises the prevention, prophylaxis, amelioration, reduction and/or alleviation of adverse events associated with immunotherapy, particularly of cancer immunotherapy, more particularly of cytokine release syndrome (CRS) in a patient suffering from a neoplastic disease as defined in the preceding embodiment, particularly in a patient at risk of developing CRS, wherein a first dose, optionally also at least one further dose, of said inhibitor is administered before administration of said antibody construct, and wherein at least on further dose of said inhibitor is administered following administration of said antibody construct, wherein the first dose of said inhibitor is administered within a first period before administration of the antibody construct, wherein optionally also said further dose of said inhibitor is administered within a second period before administration of the antibody construct, wherein another dose of said inhibitor is administered within a third period following administration of said antibody construct, wherein the further dose of said inhibitor is administered within a second period, for example within a second period before administration of the antibody construct, wherein said period is shorter than the first period of administration of the inhibitor.
   (xv) The method/a use of an inhibitor/antagonist of TNF/TNFR that reduces TNF/TNFR signaling as defined in any of the foregoing embodiments (i) to (xiv) in general Aspect A in the immunotherapeutic treatment of cancer, more particularly of CD19+ target cells, such as leukemia and/or lymphoma, particularly of ALL, according to any one of embodiments (i) to (xiv), wherein said method comprises the steps:
[0429] (a) Administering an inhibitor/antagonist of TNF/TNF-Receptor reducing TNF/TNF-Receptor signaling as defined in any of the foregoing sections,
[0430] (b) Administering an antibody construct that binds CD19 on a target cell and CD3 on a T cell,
   wherein said method comprises the prevention, prophylaxis, amelioration, reduction and/or alleviation of adverse events associated with immunotherapy, particularly of cancer immunotherapy, more particularly of cytokine release syndrome (CRS) in a patient suffering from a neoplastic disease as defined in the preceding embodiment, particularly in a patient at risk of developing CRS, wherein a first dose, optionally also at least one further dose, of said inhibitor is administered before administration of said antibody construct, and wherein at least one further dose of said inhibitor is administered following administration of said antibody construct, wherein the first dose of said inhibitor is administered within a first period before administration of the antibody construct, wherein optionally also said further dose of said inhibitor is administered within a second period before administration of the antibody construct, wherein another dose of said inhibitor is administered within a third period following administration of said antibody construct, wherein the further dose of said inhibitor is administered within a second period ranging from 30 minutes to 5 days prior to administration of the antibody construct.
   (xvi) The method/a use of an inhibitor/antagonist of TNF/TNFR that reduces TNF/TNFR signaling as defined in any of the foregoing embodiments (i) to (xiv) in general Aspect A in the immunotherapeutic treatment of cancer, more particularly of CD19+ target cells, such as leukemia and/or lymphoma, particularly of ALL, according to any one of embodiments (i) to (xv), wherein said method comprises the steps:
[0431] (a) Administering an inhibitor/antagonist of TNF/TNF-Receptor reducing TNF/TNF-Receptor signaling as defined in any of the foregoing sections,
[0432] (b) Administering an antibody construct that binds CD19 on a target cell and CD3 on a T cell,
   wherein said method comprises the prevention, prophylaxis, amelioration, reduction and/or alleviation of adverse events associated with immunotherapy, particularly of cancer immunotherapy, more particularly of cytokine release syndrome (CRS) in a patient suffering from a neoplastic disease as defined in the preceding embodiments, particularly in a patient at risk of developing CRS, wherein a first dose, optionally also at least one further dose, of said inhibitor is administered before administration of said antibody construct, and wherein further dose of said inhibitor is administered following administration of said antibody construct, wherein the first dose of said inhibitor is administered within a first period before administration of the antibody construct, wherein optionally also said further dose of said inhibitor is administered within a second period before administration of the antibody construct, wherein another dose of said inhibitor is administered within a third period following administration of said antibody construct, wherein the further dose of said inhibitor is administered within a period ranging from 30 minutes to 4 days prior to administration of the antibody construct.
   (xvii) The method/a use of an inhibitor/antagonist of TNF/TNFR that reduces TNF/TNFR signaling as defined in any of the foregoing embodiments (i) to (xiv) in general Aspect A in the immunotherapeutic treatment of cancer, more particularly of CD19+ target cells, such as leukemia and/or lymphoma, particularly of ALL, according to any one of embodiments (i) to (xvi), wherein said method comprises the steps:
[0433] (a) Administering an inhibitor/antagonist of TNF/TNF-Receptor reducing TNF/TNF-Receptor signaling as defined in any of the foregoing sections,
[0434] (b) Administering an antibody construct that binds CD19 on a target cell and CD3 on a T cell,
   wherein said method comprises the prevention, prophylaxis, amelioration, reduction and/or alleviation of adverse events associated with immunotherapy, particularly of cancer immunotherapy, more particularly of cytokine release syndrome (CRS) in a patient suffering from a neoplastic disease as defined in the preceding embodiment, particularly in a patient at risk of developing CRS, wherein a first dose, optionally also at least one further dose, of said inhibitor is administered before administration of said antibody construct, and wherein at least one further dose of said inhibitor is administered following administration of said antibody construct, wherein the first dose of said inhibitor is administered within a first period before administration of the antibody construct, wherein optionally also said further dose of said inhibitor is administered within a second period before administration of the antibody construct, wherein another dose of said inhibitor is administered within a third period following administration of said antibody construct, wherein the further dose of said inhibitor is administered within a period ranging from 30 minutes to 3 days prior to administration of the antibody construct.
   (xviii) The method/a use of an inhibitor/antagonist of TNF/TNFR that reduces TNF/TNFR signaling as defined in any of the foregoing embodiments (i) to (xiv) in general Aspect A in the immunotherapeutic treatment of cancer, more particularly of CD19+ target cells, such as leukemia and/or lymphoma, particularly of ALL, according to any one of embodiments (i) to (xvii), wherein said method comprises the steps:
[0435] (a) Administering an inhibitor/antagonist of TNF/TNF-Receptor reducing TNF/TNF-Receptor signaling as defined in any of the foregoing sections,
[0436] (b) Administering an antibody construct that binds CD19 on a target cell and CD3 on a T cell,
   wherein said method comprises the prevention, prophylaxis, amelioration, reduction and/or alleviation of adverse events associated with immunotherapy, particularly of cancer immunotherapy, more particularly of cytokine release syndrome (CRS) in a patient suffering from a neoplastic disease as defined in the preceding embodiment, particularly in a patient at risk of developing CRS, wherein a first dose, optionally also at least one further dose, of said inhibitor is administered before administration of said antibody construct, and wherein at least one further dose of said inhibitor is administered following administration of said antibody construct, wherein the first dose of said inhibitor is administered within a first period before administration of the antibody construct, wherein optionally also said further dose of said inhibitor is administered within a second period before administration of the antibody construct, wherein another dose of said inhibitor is administered within a third period following administration of said antibody construct, wherein the further dose of said inhibitor is administered within a period ranging from 30 minutes to 2 days prior to administration of the antibody construct.
   (xix) The method/a use of an inhibitor/antagonist of TNF/TNFR that reduces TNF/TNFR signaling as defined in any of the foregoing embodiments (i) to (xiv) in general Aspect A in the immunotherapeutic treatment of cancer, more particularly of CD19+ target cells, such as leukemia and/or lymphoma, particularly of ALL, according to any one of embodiments (i) to (xviii), wherein said method comprises the steps:
[0437] (a) Administering an inhibitor/antagonist of TNF/TNF-Receptor reducing TNF/TNF-Receptor signaling as defined in any of the foregoing sections,
[0438] (b) Administering an antibody construct that binds CD19 on a target cell and CD3 on a T cell,
   wherein said method comprises the prevention, prophylaxis, amelioration, reduction and/or alleviation of adverse events associated with immunotherapy, particularly of cancer immunotherapy, more particularly of cytokine release syndrome (CRS) in a patient suffering from a neoplastic disease as defined in the preceding embodiment, particularly in a patient at risk of developing CRS, wherein a first dose, optionally also at least one further dose, of said inhibitor is administered before administration of said antibody construct, and wherein at least one further dose of said inhibitor is administered following administration of said antibody construct, wherein the first dose of said inhibitor is administered within a first period before administration of the antibody construct, wherein optionally also said further dose of said inhibitor is administered within a second period before administration of the antibody construct, wherein another dose of said inhibitor is administered within a third period following administration of said antibody construct, wherein the further dose of said inhibitor is administered within a period ranging from 30 minutes to 1 day prior to administration of the antibody construct.
   (xx) The method/a use of an inhibitor/antagonist of TNF/TNFR that reduces TNF/TNFR signaling as defined in any of the foregoing embodiments (i) to (xiv) in general Aspect A in the immunotherapeutic treatment of cancer, more particularly of CD19+ target cells, such as leukemia and/or lymphoma, particularly of ALL, according to any one of embodiments (i) to (xix), wherein said method comprises the steps:
[0439] (a) Administering an inhibitor/antagonist of TNF/TNF-Receptor reducing TNF/TNF-Receptor signaling as defined in any of the foregoing sections,
[0440] (b) Administering an antibody construct that binds CD19 on a target cell and CD3 on a T cell,
   wherein said method comprises the prevention, prophylaxis, amelioration, reduction and/or alleviation of adverse events associated with immunotherapy, particularly of cancer immunotherapy, more particularly of cytokine release syndrome (CRS) in a patient suffering from a neoplastic disease as defined in the preceding embodiment, particularly in a patient at risk of developing CRS, wherein a first dose, optionally also at least one further dose, of said inhibitor is administered before administration of said antibody construct, and wherein at least one further dose of said inhibitor is administered following administration of said antibody construct, wherein the first dose of said inhibitor is administered within a first period before administration of the antibody construct, wherein optionally also said further dose of said inhibitor is administered within a second period before administration of the antibody construct, wherein another dose of said inhibitor is administered within a third period following administration of said antibody construct, wherein the first dose and at least one further dose of said inhibitor comprise different quantities of inhibitor and/or different quantities of the antibody construct.
   (xxi) The method/a use of an inhibitor/antagonist of TNF/TNFR that reduces TNF/TNFR signaling as defined in any of the foregoing embodiments (i) to (xiv) in general Aspect A in the immunotherapeutic treatment of cancer, more particularly of CD19+ target cells, such as leukemia and/or lymphoma, particularly of ALL, according to any one of embodiments (i) to (xx), wherein said method comprises the steps:
[0441] (a) Administering an inhibitor/antagonist of TNF/TNF-Receptor reducing TNF/TNF-Receptor signaling as defined in any of the foregoing sections,
[0442] (b) Administering an antibody construct that binds CD19 on a target cell and CD3 on a T cell,
   wherein said method comprises the prevention, prophylaxis, amelioration, reduction and/or alleviation of adverse events associated with immunotherapy, particularly of cancer immunotherapy, more particularly of cytokine release syndrome (CRS) in a patient suffering from a neoplastic disease as defined in the preceding embodiment, particularly in a patient at risk of developing CRS, wherein a first dose, optionally also at least one further dose, of said inhibitor is administered before administration of said antibody construct, and wherein further dose of said inhibitor is administered following administration of said antibody construct, wherein the first dose of said inhibitor is administered within a first period before administration of the antibody construct, wherein optionally also said further dose of said inhibitor is administered within a second period before administration of the antibody construct, wherein another dose of said inhibitor is administered within a third period following administration of said antibody construct, wherein the first dose and at least one further dose of said inhibitor comprise identical quantities of inhibitor and/or identical quantities of the antibody construct.
   (xxii) The method/a use of an inhibitor/antagonist of TNF/TNFR that reduces TNF/TNFR signaling as defined in any of the foregoing embodiments (i) to (xiv) in general Aspect A in the immunotherapeutic treatment of cancer, more particularly of CD19+ target cells, such as leukemia and/or lymphoma, particularly of ALL, according to any one of embodiments (i) to (xxi), wherein said method comprises the steps:
[0443] (a) Administering an inhibitor/antagonist of TNF/TNF-Receptor reducing TNF/TNF-Receptor signaling as defined in any of the foregoing sections,
[0444] (b) Administering an antibody construct that binds CD19 on a target cell and CD3 on a T cell,
   wherein said method comprises the prevention, prophylaxis, amelioration, reduction and/or alleviation of adverse events associated with immunotherapy, particularly of cancer immunotherapy, more particularly of cytokine release syndrome (CRS) in a patient suffering from a neoplastic disease as defined in the preceding embodiment, particularly in a patient at risk of developing CRS, wherein a first dose, optionally also at least one further dose, of said inhibitor is administered before administration of said antibody construct, and wherein further dose of said inhibitor is administered following administration of said antibody construct, wherein the first dose of said inhibitor is administered within a first period before administration of the antibody construct, wherein optionally also said further dose of said inhibitor is administered within a second period before administration of the antibody construct, wherein another dose of said inhibitor is administered within a third period following administration of said antibody construct, wherein another dose of said inhibitor is administered following administration of said antibody construct within a period from 1 day to 7 days following a first administration of a dose of said antibody construct.
   (xxiii) The method/a use of an inhibitor/antagonist of TNF/TNFR that reduces TNF/TNFR signaling as defined in any of the foregoing embodiments (i) to (xiv) in general Aspect A in the immunotherapeutic treatment of cancer, more particularly of CD19+ target cells, such as leukemia and/or lymphoma, particularly of ALL, according to any one of embodiments (i) to (xxii), wherein said method comprises the steps:
[0445] (a) Administering an inhibitor/antagonist of TNF/TNF-Receptor reducing TNF/TNF-Receptor signaling as defined in any of the foregoing sections,
[0446] (b) Administering an antibody construct that binds CD19 on a target cell and CD3 on a T cell,
   wherein said method comprises the prevention, prophylaxis, amelioration, reduction and/or alleviation of adverse events associated with immunotherapy, particularly of cancer immunotherapy, more particularly of cytokine release syndrome (CRS) in a patient suffering from a neoplastic disease as defined in the preceding embodiments, particularly in a patient at risk of developing CRS, wherein a first dose, optionally also at least one further dose, of said inhibitor is administered before administration of said antibody construct, and wherein at least one further dose of said inhibitor is administered following administration of said antibody construct, wherein the first dose of said inhibitor is administered within a first period before administration of the antibody construct, wherein optionally also said further dose of said inhibitor is administered within a second period before administration of the antibody construct, wherein another dose of said inhibitor is administered within a third period following administration of said antibody construct, wherein another dose of said inhibitor is administered following administration of said antibody construct within a period from 1 day to 6 days following a first administration of a dose of said antibody construct.
   (xxiv) The method/a use of an inhibitor/antagonist of TNF/TNFR that reduces TNF/TNFR signaling as defined in any of the foregoing embodiments (i) to (xiv) in general Aspect A in the immunotherapeutic treatment of cancer, more particularly of CD19+ target cells, such as leukemia and/or lymphoma, particularly of ALL, according to any one of embodiments (i) to (xxiii), wherein said method comprises the steps:
[0447] (a) Administering an inhibitor/antagonist of TNF/TNF-Receptor reducing TNF/TNF-Receptor signaling as defined in any of the foregoing sections,
[0448] (b) Administering an antibody construct that binds CD19 on a target cell and CD3 on a T cell,
   wherein said method comprises the prevention, prophylaxis, amelioration, reduction and/or alleviation of adverse events associated with immunotherapy, particularly of cancer immunotherapy, more particularly of cytokine release syndrome (CRS) in a patient suffering from a neoplastic disease as defined in the preceding embodiments, particularly in a patient at risk of developing CRS, wherein a first dose, optionally also at least one further dose, of said inhibitor is administered before administration of said antibody construct, and wherein at least one further dose of said inhibitor is administered following administration of said antibody construct, wherein the first dose of said inhibitor is administered within a first period before administration of the antibody construct, wherein optionally also said further dose of said inhibitor is administered within a second period before administration of the antibody construct, wherein another dose of said inhibitor is administered within a third period following administration of said antibody construct, wherein another dose of said inhibitor is administered following administration of said antibody construct within a period from 1 day to 5 days following a first administration of a dose of said antibody construct.
   (xxv) The method/a use of an inhibitor/antagonist of TNF/TNFR that reduces TNF/TNFR signaling as defined in any of the foregoing embodiments (i) to (xiv) in general Aspect A in the immunotherapeutic treatment of cancer, more particularly of CD19+ target cells, such as leukemia and/or lymphoma, particularly of ALL, according to any one of embodiments (i) to (xxiv), wherein said method comprises the steps:
[0449] (a) Administering an inhibitor/antagonist of TNF/TNF-Receptor reducing TNF/TNF-Receptor signaling as defined in any of the foregoing sections,
[0450] (b) Administering an antibody construct that binds CD19 on a target cell and CD3 on a T cell,
   wherein said method comprises the prevention, prophylaxis, amelioration, reduction and/or alleviation of adverse events associated with immunotherapy, particularly of cancer immunotherapy, more particularly of cytokine release syndrome (CRS) in a patient suffering from a neoplastic disease as defined in the preceding embodiment, particularly in a patient at risk of developing CRS, wherein a first dose, optionally also at least one further dose, of said inhibitor is administered before administration of said antibody construct, and wherein at least one further dose of said inhibitor is administered following administration of said antibody construct, wherein the first dose of said inhibitor is administered within a first period before administration of the antibody construct, wherein optionally also said further dose of said inhibitor is administered within a second period before administration of the antibody construct, wherein another dose of said inhibitor is administered within a third period following administration of said antibody construct, wherein another dose of said inhibitor is administered following administration of said antibody construct within a period from 1 day to 4 days following a first administration of a dose of said antibody construct.
   (xxvi) The method/a use of an inhibitor/antagonist of TNF/TNFR that reduces TNF/TNFR signaling as defined in any of the foregoing embodiments (i) to (xiv) in general Aspect A in the immunotherapeutic treatment of cancer, more particularly of CD19+ target cells, such as leukemia and/or lymphoma, particularly of ALL, according to any one of embodiments (i) to (xxv), wherein said method comprises the steps:
[0451] (a) Administering an inhibitor/antagonist of TNF/TNF-Receptor reducing TNF/TNF-Receptor signaling as defined in any of the foregoing sections,
[0452] (b) Administering an antibody construct that binds CD19 on a target cell and CD3 on a T cell,
   wherein said method comprises the prevention, prophylaxis, amelioration, reduction and/or alleviation of adverse events associated with immunotherapy, particularly of cancer immunotherapy, more particularly of cytokine release syndrome (CRS) in a patient suffering from a neoplastic disease as defined in the preceding embodiments, particularly in a patient at risk of developing CRS, wherein a first dose, optionally also at least one further dose, of said inhibitor is administered before administration of said antibody construct, and wherein at least one further dose of said inhibitor is administered following administration of said antibody construct, wherein the first dose of said inhibitor is administered within a first period before administration of the antibody construct, wherein optionally also said further dose of said inhibitor is administered within a second period before administration of the antibody construct, wherein another dose of said inhibitor is administered within a third period following administration of said antibody construct, wherein another dose of said inhibitor is administered following administration of said antibody construct within a period from 1 day to 3 days following a first administration of a dose of said antibody construct.
   (xxvii) The method/a use of an inhibitor/antagonist of TNF/TNFR that reduces TNF/TNFR signaling as defined in any of the foregoing embodiments (i) to (xiv) in general Aspect A in the immunotherapeutic treatment of cancer, more particularly of CD19+ target cells, such as leukemia and/or lymphoma, particularly of ALL, according to any one of embodiments (i) to (xxvi), wherein said method comprises the steps:
[0453] (a) Administering an inhibitor/antagonist of TNF/TNF-Receptor reducing TNF/TNF-Receptor signaling as defined in any of the foregoing sections,
[0454] (b) Administering an antibody construct that binds CD19 on a target cell and CD3 on a T cell,
   wherein said method comprises the prevention, prophylaxis, amelioration, reduction and/or alleviation of adverse events associated with immunotherapy, particularly of cancer immunotherapy, more particularly of cytokine release syndrome (CRS) in a patient suffering from a neoplastic disease as defined in the preceding embodiments, particularly in a patient at risk of developing CRS, wherein a first dose, optionally also at least one further dose, of said inhibitor is administered before administration of said antibody construct, and wherein at least one further dose of said inhibitor is administered following administration of said antibody construct, wherein the first dose of said inhibitor is administered within a first period before administration of the antibody construct, wherein optionally also said further dose of said inhibitor is administered within a second period before administration of the antibody construct, wherein another dose of said inhibitor is administered within a third period following administration of said antibody construct, wherein another dose of said inhibitor is administered following administration of said antibody construct within a period from 1 day to 2 days following a first administration of a dose of said antibody construct.
   (xxviii) The method of treating cancer with an antibody construct as defined above, particularly with a cancer immunotherapy, more particularly of CD19+ target cells, such as leukemia and/or lymphoma, particularly ALL, and for the prevention, prophylaxis, amelioration, reduction and/or alleviation of adverse events associated with immunotherapy, according to any one of embodiments (i) to (xxvii), wherein the domain of the antibody construct used in accordance with the present invention that which binds to CD19 comprises a VL region comprising CDR-L1, CDR-L2 and CDR-L3, wherein CDR-L1 is depicted in SEQ ID NO:314, CDR-L2 is depicted in SEQ ID NO: 315, and CDR-L3 is depicted in SEQ ID NO: 316.
   (xxix) The method of treating cancer with an antibody construct as defined above, particularly with a cancer immunotherapy, more particularly of CD19+ target cells, such as leukemia and/or lymphoma, particularly ALL, and for the prevention, prophylaxis, amelioration, reduction and/or alleviation of adverse events associated with immunotherapy, according to any one of embodiments (i) to (xxviii), wherein the domain which binds to CD19 comprises a VH region comprising CDR-H1, CDR-H2 and CDR-H3 selected from: CDR-H1 as depicted in SEQ ID NO: 310, CDR-H2 as depicted in SEQ ID NO: 312, and CDR-H3 as depicted in SEQ ID NO: 313; CDR-H1 as depicted in SEQ ID NO: 311, CDR-H2 as depicted in SEQ ID NO: 312, and CDR-H3 as depicted in SEQ ID NO: 313.
   (xxx) The method of treating cancer with an antibody construct as defined above, particularly with a cancer immunotherapy, more particularly of CD19+ target cells, such as leukemia and/or lymphoma, particularly ALL, and for the prevention, prophylaxis, amelioration, reduction and/or alleviation of adverse events associated with immunotherapy according to any one of embodiments (i) to (xxviii), wherein the domain which binds to CD19 comprises a VL region comprising CDR-L1, CDR-L2 and CDR-L3 and a VH region comprising CDR-H1, CDR-H2 and CDR-H3 selected from: CDR-L1 as depicted in SEQ ID NO:314, CDR-L2 as depicted in SEQ ID NO: 315, and CDR-L3 as depicted in SEQ ID NO: 316, CDR-H1 as depicted in SEQ ID NO: 310, CDR-H2 as depicted in SEQ ID NO: 312, and CDR-H3 as depicted in SEQ ID NO: 313; and CDR-L1 as depicted in SEQ ID NO:314, CDR-L2 as depicted in SEQ ID NO: 315, and CDR-L3 as depicted in SEQ ID NO: 316, CDR-H1 as depicted in SEQ ID NO: 311, CDR-H2 as depicted in SEQ ID NO: 312, and CDR-H3 as depicted in SEQ ID NO: 313.
   (xxxi) The method of treating cancer with an antibody construct as defined above, particularly with a cancer immunotherapy, more particularly of CD19+ target cells, such as leukemia and/or lymphoma, particularly ALL, and for the prevention, prophylaxis, amelioration, reduction and/or alleviation of adverse events associated with immunotherapy according to any one of embodiments (i) to (xxx), wherein the domain which binds to CD19 comprises a VL region as depicted in SEQ ID NO: 309.
   (xxxii) The method of treating cancer with an antibody construct as defined above, particularly with a cancer immunotherapy, more particularly of CD19+ target cells, such as leukemia and/or lymphoma, particularly ALL, and for the prevention, prophylaxis, amelioration, reduction and/or alleviation of adverse events associated with immunotherapy according to any one of embodiments (i) to (xxxi), wherein the domain which binds to CD19 comprises a VH region as depicted in SEQ ID NO: 308.
   (xxxiii) The method of treating cancer with an antibody construct as defined above, particularly with a cancer immunotherapy, more particularly of CD19+ target cells, such as leukemia and/or lymphoma, particularly ALL, and for the prevention, prophylaxis, amelioration, reduction and/or alleviation of adverse events associated with immunotherapy according to any one of embodiments (i) to (xxxii), wherein the domain which binds to CD19 comprises a VL region and a VH region consisting of a VL region as depicted in SEQ ID NO: 309 and a VH region as depicted in SEQ ID NO: 308.
   (xxxiv) The method of treating cancer with an antibody construct as defined above, particularly with a cancer immunotherapy, more particularly of CD19+ target cells, such as leukemia and/or lymphoma, particularly ALL, and for the prevention, prophylaxis, amelioration, reduction and/or alleviation of adverse events associated with immunotherapy according to any one of embodiments (i) to (xxxiii), wherein a domain which binds to CD19 comprises a VL region and a VH region consisting of a VL region as depicted in SEQ ID NO: 309 and a VH region as depicted in SEQ ID NO: 308, or with an antibody construct having a domain which binds to CD19 comprises a VL region comprising CDR-L1, CDR-L2 and CDR-L3 and a VH region comprising CDR-H1, CDR-H2 and CDR-H3 selected from: CDR-L1 as depicted in SEQ ID NO:314, CDR-L2 as depicted in SEQ ID NO: 315, and CDR-L3 as depicted in SEQ ID NO: 316, CDR-H1 as depicted in SEQ ID NO: 310, CDR-H2 as depicted in SEQ ID NO: 312, and CDR-H3 as depicted in SEQ ID NO: 313; and CDR-L1 as depicted in SEQ ID NO:314, CDR-L2 as depicted in SEQ ID NO: 315, and CDR-L3 as depicted in SEQ ID NO: 316, CDR-H1 as depicted in SEQ ID NO: 311, CDR-H2 as depicted in SEQ ID NO: 312, and CDR-H3 as depicted in SEQ ID NO: 313.
   (xxxv) The method of treating cancer with an antibody construct as defined above, particularly with a cancer immunotherapy, more particularly of CD19+ target cells, such as leukemia and/or lymphoma, particularly ALL, and for the prevention, prophylaxis, amelioration, reduction and/or alleviation of adverse events associated with immunotherapy according to any one of embodiments (i) to (xxxiv), wherein the domain that is part of an antibody construct which binds to CD19 competes for binding to an epitope of CD19 with an antibody construct that binds to CD19, wherein said competing antibody construct that binds to CD19 may have VL and/or VH regions that differ in their amino acid sequence(s) from the said antibody constructs as defined in the preceding embodiments, when both, the competing antibody constructs and the antibody constructs as defined in the preceding embodiments are co-incubated in a competition assay with target cells that express CD19, wherein both, competition antibody construct and antibody constructs as defined in the preceding embodiments are used at equimolar concentrations in such competition assays, wherein the competition antibody construct may be labelled and the antibody constructs as defined in the preceding embodiments may be unlabeled or differently labelled to permit a quantification to be able to distinguish the number of competition antibody construct bound to the target antigen at the end of the competition assay method, and/or wherein the amount/number of competition antibody construct that binds under such circumstances to the target is at least 50%, at least 60%, at least 70%, at least 80%, at least 90%, preferably at least 95% of all antibody constructs selectively binding to the target antigen, and/or wherein the competition antibody construct may comprise one or more, e.g. at least 2, 3, 4, 5, 6, 7, 8, 9, 10, 11, 12, 13, 14, 15, 16, 17, 18, 19, 20 or even more amino acid residues that are different from the antibody constructs as defined in the preceding embodiments.
   (xxxvi) The method of treating cancer with an antibody construct as defined above, particularly with a cancer immunotherapy, more particularly of CD19+ target cells, such as leukemia and/or lymphoma, particularly ALL, and for the prevention, prophylaxis, amelioration, reduction and/or alleviation of adverse events associated with immunotherapy according to any one of embodiments (i) to (xxxv), wherein the competing antibody constructs have at least 1, 2, 3, 4, 5, 6, 7, 8, 9, 10, or more amino acid residues that are different from the herein described antibody constructs that are characterized by a domain which binds to CD19 comprising a VL region and a VH region consisting of a VL region as depicted in SEQ ID NO: 309 and a VH region as depicted in SEQ ID NO: 308, or with an antibody construct having a domain which binds to CD19 that comprises a VL region comprising CDR-L1, CDR-L2 and CDR-L3 and a VH region comprising CDR-H1, CDR-H2 and CDR-H3 selected from: CDR-L1 as depicted in SEQ ID NO:314, CDR-L2 as depicted in SEQ ID NO: 315, and CDR-L3 as depicted in SEQ ID NO: 316, CDR-H1 as depicted in SEQ ID NO: 310, CDR-H2 as depicted in SEQ ID NO: 312, and CDR-H3 as depicted in SEQ ID NO: 313; and CDR-L1 as depicted in SEQ ID NO:314, CDR-L2 as depicted in SEQ ID NO: 315, and CDR-L3 as depicted in SEQ ID NO: 316, CDR-H1 as depicted in SEQ ID NO: 311, CDR-H2 as depicted in SEQ ID NO: 312, and CDR-H3 as depicted in SEQ ID NO: 313.

[0455] The method of treating cancer with an antibody construct as defined above, particularly with a cancer immunotherapy, more particularly of CD19+ target cells, such as leukemia and/or lymphoma, particularly ALL, and for the prevention, prophylaxis, amelioration, reduction and/or alleviation of adverse events associated with immunotherapy, according to any one of embodiments (i) to (xxxvi), wherein an antibody construct is administered that comprises at least one domain (also referred to as “first domain”) which binds to CD19 on the surface of a target cell, and at least one other domain (also referred to as “second domain”) which binds to CD3, preferably human CD3, on the surface of a T cell, according to any one of embodiments (i) to (xvi) of general Aspect A) and as defined in Sub-Aspect B-1.

(xxxvii) The method of treating cancer with an antibody construct as defined above, particularly with a cancer immunotherapy, more particularly of CD19+ target cells according to any one of embodiments (i) to (xxxvii), further comprising the prevention, prophylaxis, or reduction of adverse events associated with immunotherapy, particularly cancer immunotherapy, more particularly a blood cell-related cancer, such as leukemia or lymphoma, particularly of acute lymphoblastic leukemia (ALL), wherein an antibody construct is administered that comprises at least one domain which binds to CD19 on the surface of a target cell, and at least one other domain which binds to CD3, preferably human CD3, on the surface of a T cell, according to any one of embodiments (i) to (xiv) of general Aspect A) and as further defined in Sub-Aspect B-1, wherein said antibody construct binds to an epitope that is selectively bound by an antibody/antibody construct that has the VH chain and/or VL chain respectively, that are disclosed in WO2010052014, particularly in the sequence listing, which is hereby incorporated by reference.
(xxxviii) Further, the present invention relates to a method of treating cancer with an antibody construct as defined above, particularly with a cancer immunotherapy, more particularly of CD19+ target cells according to any one of embodiments (i) to (xxxviii), further comprising the prevention, prophylaxis, or reduction of adverse events associated with immunotherapy, particularly cancer immunotherapy, more particularly a blood cell-related cancer, such as leukemia or lymphoma, particularly of acute lymphoblastic leukemia (ALL), wherein an antibody construct is administered that comprises at least one domain which binds to CD19 on the surface of a target cell, and at least one other domain which binds to CD3, preferably human CD3, on the surface of a T cell, according to any one of embodiments (i) to (xiv) of general Aspect A) and as further defined in Sub-Aspect B-1, wherein the domain which binds to CD19 comprises a VL region comprising CDR-L1, CDR-L2 and CDR-L3, wherein CDR-L1 is depicted in SEQ ID NO:314, CDR-L2 is depicted in SEQ ID NO: 315, and CDR-L3 is depicted in SEQ ID NO: 316.

[0456] Further, the present invention relates to a method of treating cancer with an antibody construct as defined above, particularly with a cancer immunotherapy, more particularly of CD19+ target cells according to any one of embodiments (i) to (xxxix), further comprising the prevention, prophylaxis, or reduction of adverse events associated with immunotherapy, particularly cancer immunotherapy, more particularly a blood cell-related cancer, such as leukemia or lymphoma, particularly of acute lymphoblastic leukemia (ALL), wherein an antibody construct is administered that comprises at least one domain which binds to CD19 on the surface of a target cell, and at least one other domain which binds to CD3, preferably human CD3, on the surface of a T cell, according to any one of embodiments (i) to (xiv) of general Aspect A) and as further defined in Sub-Aspect B-1, wherein the domain which binds to CD19 comprises a VH region comprising CDR-H1, CDR-H2 and CDR-H3 selected from: CDR-H1 as depicted in SEQ ID NO: 310, CDR-H2 as depicted in SEQ ID NO: 312, and CDR-H3 as depicted in SEQ ID NO: 313; CDR-H1 as depicted in SEQ ID NO: 311, CDR-H2 as depicted in SEQ ID NO: 312, and CDR-H3 as depicted in SEQ ID NO: 313. Further, the present invention relates to a method of treating cancer with an antibody construct as defined above, particularly with a cancer immunotherapy, more particularly of CD19+ target cells according to any one of embodiments (i) to (xl), further comprising the prevention, prophylaxis, or reduction of adverse events associated with immunotherapy, particularly cancer immunotherapy, more particularly a blood cell-related cancer, such as leukemia or lymphoma, particularly of acute lymphoblastic leukemia (ALL), wherein an antibody construct is administered that comprises at least one domain which binds to CD19 on the surface of a target cell, and at least one other domain which binds to CD3, preferably human CD3, on the surface of a T cell, according to any one of embodiments (i) to (xiv) of general Aspect A) and as further defined in Sub-Aspect B-1, wherein the domain which binds to CD19 comprises a VL region comprising CDR-L1, CDR-L2 and CDR-L3 and a VH region comprising CDR-H1, CDR-H2 and CDR-H3 selected from: CDR-L1 as depicted in SEQ ID NO:314, CDR-L2 as depicted in SEQ ID NO: 315, and CDR-L3 as depicted in SEQ ID NO: 316, CDR-H1 as depicted in SEQ ID NO: 310, CDR-H2 as depicted in SEQ ID NO: 312, and CDR-H3 as depicted in SEQ ID NO: 313; and CDR-L1 as depicted in SEQ ID NO:314, CDR-L2 as depicted in SEQ ID NO: 315, and CDR-L3 as depicted in SEQ ID NO: 316, CDR-H1 as depicted in SEQ ID NO: 311, CDR-H2 as depicted in SEQ ID NO: 312, and CDR-H3 as depicted in SEQ ID NO: 313. Further, the present invention relates to a method of treating cancer with an antibody construct as defined above, particularly with a cancer immunotherapy, more particularly of CD19+ target cells according to any one of embodiments (i) to (xli), further comprising the prevention, prophylaxis, or reduction of adverse events associated with immunotherapy, particularly cancer immunotherapy, more particularly a blood cell-related cancer, such as leukemia or lymphoma, particularly of acute lymphoblastic leukemia (ALL), wherein an antibody construct is administered that comprises at least one domain which binds to CD19 on the surface of a target cell, and at least one other domain which binds to CD3, preferably human CD3, on the surface of a T cell, according to any one of embodiments (i) to (xiv) of general Aspect A) and as further defined in Sub-Aspect B-1, wherein the domain which binds to CD19 comprises a VL region as depicted in SEQ ID NO: 309.

(xxxix) Further, the present invention relates to a method of treating cancer with an antibody construct as defined above, particularly with a cancer immunotherapy, more particularly of CD19+ target cells according to any one of embodiments (i) to (xlii), further comprising the prevention, prophylaxis, or reduction of adverse events associated with immunotherapy, particularly cancer immunotherapy, more particularly a blood cell-related cancer, such as leukemia or lymphoma, particularly of acute lymphoblastic leukemia (ALL), wherein an antibody construct is administered that comprises at least one domain which binds to CD19 on the surface of a target cell, and at least one other domain which binds to CD3, preferably human CD3, on the surface of a T cell, according to any one of embodiments (i) to (xiv) of general Aspect A) and as further defined in Sub-Aspect B-1, wherein the domain which binds to CD19 comprises a VH region as depicted in SEQ ID NO: 308.
(xl) Further, the present invention relates to a method of treating cancer with an antibody construct as defined above, particularly with a cancer immunotherapy, more particularly of CD19+ target cells according to any one of embodiments (i) to (xliii), further comprising the prevention, prophylaxis, or reduction of adverse events associated with immunotherapy, particularly cancer immunotherapy, more particularly a blood cell-related cancer, such as leukemia or lymphoma, particularly of acute lymphoblastic leukemia (ALL), wherein an antibody construct is administered that comprises at least one domain which binds to CD19 on the surface of a target cell, and at least one other domain which binds to CD3, preferably human CD3, on the surface of a T cell, according to any one of embodiments (i) to (xvi) of general Aspect A) and as further defined in Sub-Aspect B-1, wherein the domain which binds to CD19 comprises a VL region and a VH region consisting a VL region as depicted in SEQ ID NO: 309 and a VH region as depicted in SEQ ID NO: 308.
(xli) Further, the present invention relates to a method of treating cancer with an antibody construct as defined above, particularly with a cancer immunotherapy, more particularly of CD19+ target cells according to any one of embodiments (i) to (xliv), further comprising the prevention, prophylaxis, or reduction of adverse events associated with immunotherapy, particularly cancer immunotherapy, more particularly a blood cell-related cancer, such as leukemia or lymphoma, particularly of acute lymphoblastic leukemia (ALL), wherein an antibody construct is administered that comprises at least one domain which binds to CD19 on the surface of a target cell, and at least one other domain which binds to CD3, preferably human CD3, on the surface of a T cell, according to any one of embodiments (i) to (xvi) of general Aspect A) and as further defined in Sub-Aspect B-1, wherein the first domain which binds to CD19 competes for binding to CD19 with an antibody construct in accordance with the present invention that is characterized by a domain which binds to CD19 comprising a VL region and a VH region consisting a VL region as depicted in SEQ ID NO: 309 and a VH region as depicted in SEQ ID NO: 308, or with an antibody construct having a domain which binds to CD19 comprises a VL region comprising CDR-L1, CDR-L2 and CDR-L3 and a VH region comprising CDR-H1, CDR-H2 and CDR-H3 selected from: CDR-L1 as depicted in SEQ ID NO:314, CDR-L2 as depicted in SEQ ID NO: 315, and CDR-L3 as depicted in SEQ ID NO: 316, CDR-H1 as depicted in SEQ ID NO: 310, CDR-H2 as depicted in SEQ ID NO: 312, and CDR-H3 as depicted in SEQ ID NO: 313; and CDR-L1 as depicted in SEQ ID NO:314, CDR-L2 as depicted in SEQ ID NO: 315, and CDR-L3 as depicted in SEQ ID NO: 316, CDR-H1 as depicted in SEQ ID NO: 311, CDR-H2 as depicted in SEQ ID NO: 312, and CDR-H3 as depicted in SEQ ID NO: 313.
(xlii) Further, the present invention relates to a method of treating cancer with an antibody construct as defined above, particularly with a cancer immunotherapy, more particularly of CD19+ target cells, wherein the adverse event associated with immunotherapy is increased cytokine release of TNF, IL-1, MCP-1, and/or IL-6, particularly wherein the adverse event is cytokine release syndrome (CRS) or tumor lysis syndrome (TLS), wherein the adverse events may also include a neurological reaction, selected from the group comprising confusion, ataxia, disorientation, dysphasia, aphasia, speech impairment, cerebellar symptoms, tremor, apraxia, seizure, grand mal convulsion, palsy, and balance disorder.
(xliii) Further, the present invention relates to a method of treating cancer with an antibody construct as defined above, particularly with a cancer immunotherapy, more particularly of CD19+ target cells, further comprising the prevention, prophylaxis, or reduction of adverse events associated with immunotherapy, particularly cancer immunotherapy, more particularly a blood cell-related cancer, such as leukemia or lymphoma, particularly of acute lymphoblastic leukemia (ALL) according to any one of embodiments (i) to (xlvi), wherein the second domain of said antibody construct binds to CD3, preferably human CD3, epsilon and to Callithrix jacchus or Saimiri sciureus CD3 epsilon.
(xliv) Further, the present invention relates to a method of treating cancer with an antibody construct as defined above, particularly with a cancer immunotherapy, more particularly of CD19+ target cells, further comprising the prevention, prophylaxis, or reduction of adverse events associated with immunotherapy, particularly cancer immunotherapy, more particularly a blood cell-related cancer, such as leukemia or lymphoma, particularly of acute lymphoblastic leukemia (ALL) according to any one of embodiments (i) to (xlvii), wherein
[0457] (a) the antibody construct is a single chain antibody construct,
[0458] (b) the first domain is in the format of an scFv,
[0459] (c) the second domain is in the format of an scFv,
[0460] (d) the first and the second domain are connected via a linker, and/or
[0461] (e) the antibody construct comprises a domain providing an extended serum half-life.
   (xlv) Further, the present invention relates to a method of treating cancer with an antibody construct as defined above, particularly with a cancer immunotherapy, more particularly of CD19+ target cells, further comprising the prevention, prophylaxis, or reduction of adverse events associated with immunotherapy, particularly cancer immunotherapy, more particularly a blood cell-related cancer, such as leukemia or lymphoma, particularly of acute lymphoblastic leukemia (ALL) according to any one of embodiments (i) to (xlviii), wherein the inhibitor/antagonist of TNF/TNFR that reduces TNF/TNFR signaling is selected from the group comprising small molecules, biological molecules, antibodies and derivatives thereof, aptamers, and the like.
   (xlvi) Further, the present invention relates to a method of treating cancer with an antibody construct as defined above, particularly with a cancer immunotherapy, more particularly of CD19+ target cells, further comprising the prevention, prophylaxis, or reduction of adverse events associated with immunotherapy, particularly cancer immunotherapy, more particularly a blood cell-related cancer, such as leukemia or lymphoma, particularly of acute lymphoblastic leukemia (ALL) according to any one of embodiments (i) to (xlix), wherein the inhibitor/antagonist of TNF/TNFR that reduces TNF/TNFR signaling is selected from the group of TNF inhibitors comprising etanercept, infliximab, adalimumab, certolizumab Pergol, and golimumab, particularly etanercept.
   (xlvii) Further, the present invention relates to a method of treating cancer with an antibody construct as defined above, particularly with a cancer immunotherapy, more particularly of CD19+ target cells according to any one of embodiments (i) to (l), particularly for administration to a patient at risk of developing adverse events or having an intolerance to at least one of a group comprising corticosteroids, IL-6-inhibitors, IL-6R-inhibitors, and/or TNF/TNFR inhibitors different from an inhibitor/antagonist of TNF/TNFR that reduces TNF/TNFR signaling according to any of the preceding embodiments.
   (xlviii) Further, the present invention relates to a method of treating cancer with an antibody construct as defined above, particularly with a cancer immunotherapy, more particularly of CD19+ target cells according to any one of embodiments (i) to (li), particularly for administration to a patient at risk of developing adverse events or having an intolerance to corticosteroids, wherein the corticosteroid is dexamethasone.
   (xlix) Further, the present invention relates to a method of treating cancer with an antibody construct as defined above, particularly with a cancer immunotherapy, more particularly of CD19+ target cells according to any one of embodiments (i) to (lii), particularly for administration to a patient at risk of developing adverse events or having an intolerance to IL-6-antagonists and/or IL-6R-antagonists, wherein the IL-6-antagonists and/or IL-6R-antagonists are selected from the group comprising tocilizumab, siltuximab, olokizumab, elsilimomab, clazakizumab, sirukumab, particularly tocilizumab, and/or wherein said combination product is for administration to a patient at risk of developing adverse events or having an intolerance to TNF/TNFR inhibitors, wherein the TNF/TNFR inhibitor is selected from the group comprising infliximab, adalimumab, certolizumab Pergol, and/or golimumab.
   (l) Further, the present invention relates to a method of treating cancer with an antibody construct as defined above, particularly with a cancer immunotherapy, more particularly of CD19+ target cells according to any one of embodiments (i) to (liii), further comprising administering at least one corticosteroid, particularly wherein said corticostoid is dexamethasone.
   (li) Further, the present invention relates to a method of treating cancer with an antibody construct as defined above, particularly with a cancer immunotherapy, more particularly of CD19+ target cells according to any one of embodiments (i) to (liv), further comprising administering an IL-6R-antagonist, wherein said IL-6R-antagonist is tocilizumab.
   (lii) Further, the present invention relates to a method of treating cancer with an antibody construct as defined above, particularly with a cancer immunotherapy, more particularly of CD19+ target cells according to any one of embodiments (i) to (lv), further comprising administering at least one corticosteroid, particularly dexamethasone and/or at least one IL-6 and/or IL-6R-antagonist, particularly tocilizumab, wherein said at least one corticosteroid and/or said IL-6 and/or IL-6R-antagonist is for administration to a patient in need thereof prior to, concomitant with, and/or after administration of said antibody construct.
   (liii) Further, the present invention relates to a method of treating cancer with an antibody construct as defined above, particularly with a cancer immunotherapy, more particularly of CD19+ target cells according to any one of embodiments (i) to (lvi), further comprising administering the antibody construct as defined in any of the above embodiments, or administering a composition for the use of any one of the preceding embodiments that comprises the antibody construct as defined in the preceding embodiments of Sections Sub-Aspect A1, Sub-Aspect B1, i.e. relating to antibody constructs selectively binding CD19, wherein a first dose of the antibody construct or a composition as defined in any of the above embodiments is administered for a first period of time and consecutively a second dose of the composition is administered for a second period of time, wherein the second dose exceeds the first dose.
   (liv) Further, the present invention relates to a method of treating cancer with an antibody construct as defined above, particularly with a cancer immunotherapy, more particularly of CD19+ target cells according to any one of embodiments (i) to (lvii), further comprising administering the antibody construct as defined in any of the above embodiments, or administering a composition for the use of any one of the preceding embodiments that comprises the antibody construct as defined in the preceding embodiments of Sections Sub-Aspect A1, Sub-Aspect B1, i.e. relating to antibody constructs selectively binding CD19, wherein a first dose of the antibody construct or a composition as defined in any of the above embodiments is administered for a first period of time, wherein said first dose is between 1 and 15 μg/m2/d, 5, 10 or 15 μg/m2/d being preferred.
   (1v) Further, the present invention relates to a method of treating cancer with an antibody construct as defined above, particularly with a cancer immunotherapy, more particularly of CD19+ target cells according to any one of embodiments (i) to (lix), further comprising administering the antibody construct as defined in any of the above embodiments, or administering a composition for the use of any one of the preceding embodiments that comprises the antibody construct as defined in the preceding embodiments of Sections Sub-Aspect A1, Sub-Aspect B1, i.e. relating to antibody constructs selectively binding CD19, wherein a first dose of the antibody construct or a composition as defined in any of the above embodiments is administered for a first period of time, and consecutively a second dose of the composition is administered for a second period of time, wherein said second dose is between 15 and 60 μg/m2/d, 60 μg/m2/d being preferred.
   (lvi) Further, the present invention relates to a method of treating cancer with an antibody construct as defined above, particularly with a cancer immunotherapy, more particularly of CD19+ target cells according to any one of embodiments (i) to (lix), further comprising administering the antibody construct as defined in any of the above embodiments, or administering a composition for the use of any one of the preceding embodiments that comprises the antibody construct as defined in the preceding embodiments of Sections Sub-Aspect A1, Sub-Aspect B1, i.e. relating to antibody constructs selectively binding CD19, wherein a first dose of construct is administered, further comprising administering after a first and second dose for a first and second period of time a third dose of the construct for a third period of time.
   (lvii) Further, the present invention relates to a method of treating cancer with an antibody construct as defined above, particularly with a cancer immunotherapy, more particularly of CD19+ target cells according to any one of embodiments (i) to (liv), further comprising administering the antibody construct as defined in any of the above embodiments, or administering a composition for the use of any one of the preceding embodiments that comprises the antibody construct as defined in the preceding embodiments of Sections Sub-Aspect A1, Sub-Aspect B1, i.e. relating to antibody constructs selectively binding CD19, wherein the third period of time exceeds the first and second period of time, whereby the second dose exceeds said first dose.
   (lviii) Further, the present invention relates to a method of treating cancer with an antibody construct as defined above, particularly with a cancer immunotherapy, more particularly of CD19+ target cells according to any one of embodiments (i) to (liv), further comprising administering the antibody construct as defined in any of the above embodiments, or administering a composition for the use of any one of the preceding embodiments that comprises the antibody construct as defined in the preceding embodiments of Sections Sub-Aspect A1, Sub-Aspect B1, i.e. relating to antibody constructs selectively binding CD19, wherein the third dose exceeds the first and second dose
   (lix) Further, the present invention relates to a method of treating cancer with an antibody construct as defined above, particularly with a cancer immunotherapy, more particularly of CD19+ target cells according to any one of embodiments (i) to (liv), further comprising administering the antibody construct as defined in any of the above embodiments, or administering a composition for the use of any one of the preceding embodiments that comprises the antibody construct as defined in the preceding embodiments of Sections Sub-Aspect A1, Sub-Aspect B1, i.e. relating to antibody constructs selectively binding CD19, wherein said first dose is between 1 and 15 μg/m2/d, 5 μg/m2/d being preferred.
   (lx) Further, the present invention relates to a method of treating cancer with an antibody construct as defined above, particularly with a cancer immunotherapy, more particularly of CD19+ target cells according to any one of embodiments (i) to (liv), further comprising administering the antibody construct as defined in any of the above embodiments, or administering a composition for the use of any one of the preceding embodiments that comprises the antibody construct as defined in the preceding embodiments of Sections Sub-Aspect A1, Sub-Aspect B1, i.e. relating to antibody constructs selectively binding CD19, wherein said second dose is between 1 and 15 μg/m2/d, 15 μg/m2/d being preferred.
   (lxi) Further, the present invention relates to a method of treating cancer with an antibody construct as defined above, particularly with a cancer immunotherapy, more particularly of CD19+ target cells according to any one of embodiments (i) to (liv), further comprising administering the antibody construct as defined in any of the above embodiments, or administering a composition for the use of any one of the preceding embodiments that comprises the antibody construct as defined in the preceding embodiments of Sections Sub-Aspect A1, Sub-Aspect B1, i.e. relating to antibody constructs selectively binding CD19, wherein said third dose is between 15 and 60 μg/m2/d or 15 and 90 or 120 μg/m2/d, 60 μg/m2/d being preferred.
   (lxii) Further, the present invention relates to a method of treating cancer with an antibody construct as defined above, particularly with a cancer immunotherapy, more particularly of CD19+ target cells according to any one of embodiments (i) to (liv), further comprising administering the antibody construct as defined in any of the above embodiments, or administering a composition for the use of any one of the preceding embodiments that comprises the antibody construct as defined in the preceding embodiments of Sections Sub-Aspect A1, Sub-Aspect B1, i.e. relating to antibody constructs selectively binding CD19, wherein during treatment, the antibody is dosed at a constant dose selected from the group consisting of 5 μg/m2/d, 15 μg/m2/d or 60 μg/m2/d, 60 μg/m2/d being preferred.
   Sub-Aspect F-2—Dosing of an TNF/TNFR Inhibitor/Antagonist Together with Antibody Constructs Binding CD33

[0462] The present invention relates also to a method/a use of an inhibitor/antagonist of TNF/TNFR that reduces TNF/TNFR signaling as defined in any of the foregoing embodiments (i) to (xiv) in general Aspect A in the treatment of cancer, and particularly for the prevention of adverse events associated with immunotherapy, particularly of cancer immunotherapy, very particularly of CRS, in accordance with any of the methods as defined explicitly in Aspect B, particularly in Sub-Aspect B-2, in a patient suffering from a neoplastic disease and who is at risk of CRS as defined in the preceding embodiments, wherein said patient is a person subjected to therapy with an antibody construct comprising a first domain which binds to a target antigen on the surface of a target cell, and a second domain which binds to CD3, preferably human CD3, on the surface of a T cell as defined in any of the foregoing embodiments, wherein a first dose of said inhibitor is administered before administration of a first dose of said antibody construct, and wherein said antibody construct binds CD33.

[0463] It is preferred for this aspect, and for all other aspects of the invention relating to CD33 as target antigen that the neoplastic disease is a myeloid leukemia that is selected from the group consisting of acute myeloblastic leukemia, chronic neutrophilic leukemia, myeloid dendritic cell leukemia, accelerated phase chronic myelogenous leukemia, acute myelomonocytic leukemia, juvenile myelomonocytic leukemia, chronic myelomonocytic leukemia, acute basophilic leukemia, acute eosinophilic leukemia, chronic eosinophilic leukemia, acute megakaryoblastic leukemia, essential thrombocytosis, acute erythroid leukemia, polycythemia vera, myelodysplastic syndrome, acute panmyeloic leukemia, myeloid sarcoma, and acute biphenotypic leukaemia. More preferably, the myeloid leukemia is an acute myeloid leukemia (AML). The definition of AML, inter alia, comprises acute myeloblastic leukemia, acute myeloid dendritic cell leukemia, acute myelomonocytic leukemia, acute basophilic leukemia, acute eosinophilic leukemia, acute megakaryoblastic leukemia, acute erythroid leukemia, and acute panmyeloic leukemia.

[0464] The present invention relates to methods/uses of the inhibitor/antagonist of TNF/TNFR that reduces TNF/TNFR signaling as defined in any of the foregoing embodiments (i) to (xiv) in general Aspect A for the prevention of adverse events associated with immunotherapy, particularly of cancer immunotherapy, very particularly of CRS, in accordance with any of the methods as defined explicitly in Aspect B, particularly in Sub-Aspect B-2, in a patient suffering from a neoplastic disease and who is at risk of CRS as defined in the preceding embodiments, wherein said patient is a person subjected to therapy with an antibody construct comprising a first domain which binds to a target antigen on the surface of a target cell, and a second domain which binds to CD3, preferably human CD3, on the surface of a T cell as defined in any of the foregoing embodiments, wherein a first dose of said inhibitor is administered before administration of a first dose of said antibody construct, and wherein said antibody construct binds CD33, which may be further defined as in the following embodiments:

(i) A method of treating cancer with an antibody construct as defined above, particularly with a cancer immunotherapy, more particularly of CD33+ target cells, such as leukemia and/or lymphoma, particularly myeloid leukemia, more particularly AML, wherein said method comprises the steps:
[0465] (a) Administering an inhibitor/antagonist of TNF/TNFR reducing TNF/TNFR signaling as defined in any of the foregoing sections,
[0466] (b) Administering an antibody construct that binds CD33 on a target cell and CD3 on a T cell,
   wherein a first dose of said inhibitor is administered before administration of a first dose of said antibody construct.
   (ii) The method of treating cancer with an antibody construct as defined above, particularly with a cancer immunotherapy, more particularly of CD33+ target cells, such as leukemia and/or lymphoma, particularly myeloid leukemia, more particularly AML, according to embodiment (i), wherein said method comprises the steps:
[0467] (a) Administering an inhibitor/antagonist of TNF/TNFR reducing TNF/TNFR signaling as defined in any of the foregoing sections,
[0468] (b) Administering an antibody construct that binds CD33 on a target cell and CD3 on a T cell,
   wherein said method comprises the prevention, prophylaxis, amelioration, reduction and/or alleviation of adverse events associated with immunotherapy, particularly of cancer immunotherapy, more particularly of cytokine release syndrome (CRS) in a patient suffering from a neoplastic disease as defined in the preceding embodiment, particularly in a patient at risk of developing CRS.
   (iii) The method of treating cancer with an antibody construct as defined above, particularly with a cancer immunotherapy, more particularly of CD33+ target cells, such as leukemia and/or lymphoma, particularly myeloid leukemia, more particularly AML, according to embodiment (i) or (ii), wherein said method comprises the steps:
[0469] (a) Administering an inhibitor/antagonist of TNF/TNFR reducing TNF/TNFR signaling as defined in any of the foregoing sections,
[0470] (b) Administering an antibody construct that binds CD33 on a target cell and CD3 on a T cell,
   wherein said method comprises the prevention, prophylaxis, amelioration, reduction and/or alleviation of adverse events associated with immunotherapy, particularly of cancer immunotherapy, more particularly of cytokine release syndrome (CRS) in a patient suffering from a neoplastic disease as defined in the preceding embodiment, particularly in a patient at risk of developing CRS, wherein at least one further dose, preferably a second dose, of said inhibitor is administered before administration of said antibody construct.
   (iv) The method of treating cancer with an antibody construct as defined above, particularly with a cancer immunotherapy, more particularly of CD33+ target cells, such as leukemia and/or lymphoma, particularly myeloid leukemia, more particularly AML, according to any one of embodiments (i) to (iii), wherein said method comprises the steps:
[0471] (a) Administering an inhibitor/antagonist of TNF/TNFR reducing TNF/TNFR signaling as defined in any of the foregoing sections,
[0472] (b) Administering an antibody construct that binds CD33 on a target cell and CD3 on a T cell,
   wherein said method comprises the prevention, prophylaxis, amelioration, reduction and/or alleviation of adverse events associated with immunotherapy, particularly of cancer immunotherapy, more particularly of cytokine release syndrome (CRS) in a patient suffering from a neoplastic disease as defined in the preceding embodiment, particularly in a patient at risk of developing CRS, wherein a first dose, optionally also at least one further dose, of said inhibitor is administered before administration of said antibody construct, and wherein a further dose of said inhibitor is administered following administration of said antibody construct.
   (v) The method of treating cancer with an antibody construct as defined above, particularly with a cancer immunotherapy, more particularly of CD33+ target cells, such as leukemia and/or lymphoma, particularly myeloid leukemia, more particularly AML, according to any one of embodiments (i) to (iv), wherein said method comprises the steps:
[0473] (a) Administering an inhibitor/antagonist of TNF/TNFR reducing TNF/TNFR signaling as defined in any of the foregoing sections,
[0474] (b) Administering an antibody construct that binds CD33 on a target cell and CD3 on a T cell,
   wherein said method comprises the prevention, prophylaxis, amelioration, reduction and/or alleviation of adverse events associated with immunotherapy, particularly of cancer immunotherapy, more particularly of cytokine release syndrome (CRS) in a patient suffering from a neoplastic disease as defined in the preceding embodiment, particularly in a patient at risk of developing CRS, wherein a first dose, optionally also at least one further dose, of said inhibitor is administered before administration of said antibody construct, and wherein further dose of said inhibitor is administered following administration of said antibody construct, wherein the first dose of said inhibitor is administered within a first period before administration of the antibody construct, wherein optionally also said further dose of said inhibitor is administered within a second period before administration of the antibody construct, wherein another dose of said inhibitor is administered within a third period following administration of said antibody construct.
   (vi) The method of treating cancer with an antibody construct as defined above, particularly with a cancer immunotherapy, more particularly of CD33+ target cells, such as leukemia and/or lymphoma, particularly myeloid leukemia, more particularly AML, according to any one of embodiments (i) to (v), wherein said method comprises the steps:
[0475] (a) Administering an inhibitor/antagonist of TNF/TNFR reducing TNF/TNFR signaling as defined in any of the foregoing sections,
[0476] (b) Administering an antibody construct that binds CD33 on a target cell and CD3 on a T cell,
   wherein said method comprises the prevention, prophylaxis, amelioration, reduction and/or alleviation of adverse events associated with immunotherapy, particularly of cancer immunotherapy, more particularly of cytokine release syndrome (CRS) in a patient suffering from a neoplastic disease as defined in the preceding embodiment, particularly in a patient who is at risk of developing CRS, wherein a first dose, optionally also at least one further dose, of said inhibitor is administered before administration of said antibody construct, and wherein the at least one further dose of said inhibitor is administered following administration of said antibody construct, wherein the first dose of said inhibitor is administered within a first period before administration of the antibody construct, wherein optionally also said further dose of said inhibitor is administered within a second period before administration of the antibody construct, wherein another dose of said inhibitor is administered within a third period following administration of said antibody construct, wherein the first dose of said inhibitor is administered within a first period before administration of the antibody construct, said period ranging from 30 minutes to 7 days prior to administration of the antibody construct.
   (vii) The method of treating cancer with an antibody construct as defined above, particularly with a cancer immunotherapy, more particularly of CD33+ target cells, such as leukemia and/or lymphoma, particularly myeloid leukemia, more particularly AML, according to any one of embodiments (i) to (vi), wherein said method comprises the steps:
[0477] (a) Administering an inhibitor/antagonist of TNF/TNFR reducing TNF/TNFR signaling as defined in any of the foregoing sections,
[0478] (b) Administering an antibody construct that binds CD33 on a target cell and CD3 on a T cell,
   wherein said method comprises the prevention, prophylaxis, amelioration, reduction and/or alleviation of adverse events associated with immunotherapy, particularly of cancer immunotherapy, more particularly of cytokine release syndrome (CRS) in a patient suffering from a neoplastic disease as defined in the preceding embodiment, particularly a patient who is at risk of developing CRS, wherein a first dose, optionally also at least one further dose, of said inhibitor is administered before administration of said antibody construct, and wherein at least one further dose of said inhibitor is administered following administration of said antibody construct, wherein the first dose of said inhibitor is administered within a first period before administration of the antibody construct, wherein optionally also said further dose of said inhibitor is administered within a second period before administration of the antibody construct, wherein another dose of said inhibitor is administered within a third period following administration of said antibody construct, wherein the first dose of said inhibitor is administered within a first period before administration of the antibody construct, said period ranging from 30 minutes to 6 days prior to administration of the antibody construct.
   (viii) The method of treating cancer with an antibody construct as defined above, particularly with a cancer immunotherapy, more particularly of CD33+ target cells, such as leukemia and/or lymphoma, particularly myeloid leukemia, more particularly AML, according to any one of embodiments (i) to (vii), wherein said method comprises the steps:
[0479] (a) Administering an inhibitor/antagonist of TNF/TNFR reducing TNF/TNFR signaling as defined in any of the foregoing sections,
[0480] (b) Administering an antibody construct that binds CD33 on a target cell and CD3 on a T cell,
   wherein said method comprises the prevention, prophylaxis, amelioration, reduction and/or alleviation of adverse events associated with immunotherapy, particularly of cancer immunotherapy, more particularly of cytokine release syndrome (CRS) in a patient suffering from a neoplastic disease as defined in the preceding embodiment, particularly a patient who is at risk of developing CRS, wherein a first dose, optionally also at least one further dose, of said inhibitor is administered before administration of said antibody construct, and wherein at least one further dose of said inhibitor is administered following administration of said antibody construct, wherein the first dose of said inhibitor is administered within a first period before administration of the antibody construct, wherein optionally also said further dose of said inhibitor is administered within a second period before administration of the antibody construct, wherein another dose of said inhibitor is administered within a third period following administration of said antibody construct, wherein the first dose of said inhibitor is administered within a first period before administration of the antibody construct, said period ranging from 30 minutes to 5 days prior to administration of the antibody construct.
   (ix) The method of treating cancer with an antibody construct as defined above, particularly with a cancer immunotherapy, more particularly of CD33+ target cells, such as leukemia and/or lymphoma, particularly myeloid leukemia, more particularly AML, according to any one of embodiments (i) to (viii), wherein said method comprises the steps:
[0481] (a) Administering an inhibitor/antagonist of TNF/TNFR reducing TNF/TNFR signaling as defined in any of the foregoing sections,
[0482] (b) Administering an antibody construct that binds CD33 on a target cell and CD3 on a T cell,
   wherein said method comprises the prevention, prophylaxis, amelioration, reduction and/or alleviation of adverse events associated with immunotherapy, particularly of cancer immunotherapy, more particularly of cytokine release syndrome (CRS) in a patient suffering from a neoplastic disease as defined in the preceding embodiment, particularly a patient who is at risk of developing CRS, wherein a first dose, optionally also at least one further dose, of said inhibitor is administered before administration of said antibody construct, and wherein at least one further dose of said inhibitor is administered following administration of said antibody construct, wherein the first dose of said inhibitor is administered within a first period before administration of the antibody construct, wherein optionally also said further dose of said inhibitor is administered within a second period before administration of the antibody construct, wherein another dose of said inhibitor is administered within a third period following administration of said antibody construct, wherein the first dose of said inhibitor is administered within a first period before administration of the antibody construct, said period ranging from 30 minutes to 4 days prior to administration of the antibody construct.
   (x) The method of treating cancer with an antibody construct as defined above, particularly with a cancer immunotherapy, more particularly of CD33+ target cells, such as leukemia and/or lymphoma, particularly myeloid leukemia, more particularly AML, according to any one of embodiments (i) to (ix), wherein said method comprises the steps:
[0483] (a) Administering an inhibitor/antagonist of TNF/TNFR reducing TNF/TNFR signaling as defined in any of the foregoing sections,
[0484] (b) Administering an antibody construct that binds CD33 on a target cell and CD3 on a T cell,
   wherein said method comprises the prevention, prophylaxis, amelioration, reduction and/or alleviation of adverse events associated with immunotherapy, particularly of cancer immunotherapy, more particularly of cytokine release syndrome (CRS) in a patient suffering from a neoplastic disease as defined in the preceding embodiment, particularly a patient who is at risk of developing CRS, wherein a first dose, optionally also at least one further dose, of said inhibitor is administered before administration of said antibody construct, and wherein at least one further dose of said inhibitor is administered following administration of said antibody construct, wherein the first dose of said inhibitor is administered within a first period before administration of the antibody construct, wherein optionally also said further dose of said inhibitor is administered within a second period before administration of the antibody construct, wherein another dose of said inhibitor is administered within a third period following administration of said antibody construct, wherein the first dose of said inhibitor is administered within a first period before administration of the antibody construct, said period ranging from 30 minutes to 3 days prior to administration of the antibody construct.
   (xi) The method of treating cancer with an antibody construct as defined above, particularly with a cancer immunotherapy, more particularly of CD33+ target cells, such as leukemia and/or lymphoma, particularly myeloid leukemia, more particularly AML, according to any one of embodiments (i) to (x), wherein said method comprises the steps:
[0485] (a) Administering an inhibitor/antagonist of TNF/TNFR reducing TNF/TNFR signaling as defined in any of the foregoing sections,
[0486] (b) Administering an antibody construct that binds CD33 on a target cell and CD3 on a T cell,
   wherein said method comprises the prevention, prophylaxis, amelioration, reduction and/or alleviation of adverse events associated with immunotherapy, particularly of cancer immunotherapy, more particularly of cytokine release syndrome (CRS) in a patient suffering from a neoplastic disease as defined in the preceding embodiment, particularly a patient who is at risk of developing CRS, wherein a first dose, optionally also at least one further dose, of said inhibitor is administered before administration of said antibody construct, and wherein at least one further dose of said inhibitor is administered following administration of said antibody construct, wherein the first dose of said inhibitor is administered within a first period before administration of the antibody construct, wherein optionally also said further dose of said inhibitor is administered within a second period before administration of the antibody construct, wherein another dose of said inhibitor is administered within a third period following administration of said antibody construct, wherein the first dose of said inhibitor is administered within a first period before administration of the antibody construct, said period ranging from 30 minutes to 2 days prior to administration of the antibody construct.
   (xii) The method of treating cancer with an antibody construct as defined above, particularly with a cancer immunotherapy, more particularly of CD33+ target cells, such as leukemia and/or lymphoma, particularly myeloid leukemia, more particularly AML, according to any one of embodiments (i) to (xi), wherein said method comprises the steps:
[0487] (a) Administering an inhibitor/antagonist of TNF/TNFR reducing TNF/TNFR signaling as defined in any of the foregoing sections,
[0488] (b) Administering an antibody construct that binds CD33 on a target cell and CD3 on a T cell,
   wherein said method comprises the prevention, prophylaxis, amelioration, reduction and/or alleviation of adverse events associated with immunotherapy, particularly of cancer immunotherapy, more particularly of cytokine release syndrome (CRS) in a patient suffering from a neoplastic disease as defined in the preceding embodiment, particularly a patient who is at risk of developing CRS, wherein a first dose, optionally also at least one further dose, of said inhibitor is administered before administration of said antibody construct, and wherein at least one further dose of said inhibitor is administered following administration of said antibody construct, wherein the first dose of said inhibitor is administered within a first period before administration of the antibody construct, wherein optionally also said further dose of said inhibitor is administered within a second period before administration of the antibody construct, wherein another dose of said inhibitor is administered within a third period following administration of said antibody construct, wherein the first dose of said inhibitor is administered within a first period before administration of the antibody construct, said period ranging from 30 minutes to 1 day prior to administration of the antibody construct.
   (xiii) The method of treating cancer with an antibody construct as defined above, particularly with a cancer immunotherapy, more particularly of CD33+ target cells, such as leukemia and/or lymphoma, particularly myeloid leukemia, more particularly AML, according to any one of embodiments (i) to (xii), wherein said method comprises the steps:
[0489] (a) Administering an inhibitor/antagonist of TNF/TNF-Receptor reducing TNF/TNFR signaling as defined in any of the foregoing sections,
[0490] (b) Administering an antibody construct that binds CD33 on a target cell and CD3 on a T cell,
   wherein said method comprises the prevention, prophylaxis, amelioration, reduction and/or alleviation of adverse events associated with immunotherapy, particularly of cancer immunotherapy, more particularly of cytokine release syndrome (CRS) in a patient suffering from a neoplastic disease as defined in the preceding embodiment, particularly a patient who is at risk of developing CRS, wherein a first dose, optionally also at least one further dose, of said inhibitor is administered before administration of said antibody construct, and wherein at least one further dose of said inhibitor is administered following administration of said antibody construct, wherein the first dose of said inhibitor is administered within a first period before administration of the antibody construct, wherein optionally also said further dose of said inhibitor is administered within a second period before administration of the antibody construct, wherein another dose of said inhibitor is administered within a third period following administration of said antibody construct, wherein the first dose of said inhibitor is administered within a first period before administration of the antibody construct, said period ranging from 60 minutes to 1 day prior to administration of the antibody construct.
   (xiv) The method of treating cancer with an antibody construct as defined above, particularly with a cancer immunotherapy, more particularly of CD33+ target cells, such as leukemia and/or lymphoma, particularly myeloid leukemia, more particularly AML, according to any one of embodiments (i) to (xiii), wherein said method comprises the steps:
[0491] (a) Administering an inhibitor/antagonist of TNF/TNFR reducing TNF/TNFR signaling as defined in any of the foregoing sections,
[0492] (b) Administering an antibody construct that binds CD33 on a target cell and CD3 on a T cell,
   wherein said method comprises the prevention, prophylaxis, amelioration, reduction and/or alleviation of adverse events associated with immunotherapy, particularly of cancer immunotherapy, more particularly of cytokine release syndrome (CRS) in a patient suffering from a neoplastic disease as defined in the preceding embodiment, particularly a patient who is at risk of developing CRS, wherein a first dose, optionally also at least one further dose, of said inhibitor is administered before administration of said antibody construct, and wherein at least one further dose of said inhibitor is administered following administration of said antibody construct, wherein the first dose of said inhibitor is administered within a first period before administration of the antibody construct, wherein optionally also said further dose of said inhibitor is administered within a second period before administration of the antibody construct, wherein another dose of said inhibitor is administered within a third period following administration of said antibody construct, wherein the further dose of said inhibitor is administered within a second period, for example within a second period before administration of the antibody construct, wherein said period is shorter than the first period of administration of the inhibitor.
   (xv) The method of treating cancer with an antibody construct as defined above, particularly with a cancer immunotherapy, more particularly of CD33+ target cells, such as leukemia and/or lymphoma, particularly myeloid leukemia, more particularly AML, according to any one of embodiments (i) to (xvi), wherein said method comprises the steps:
[0493] (a) Administering an inhibitor/antagonist of TNF/TNFR reducing TNF/TNFR signaling as defined in any of the foregoing sections,
[0494] (b) Administering an antibody construct that binds CD33 on a target cell and CD3 on a T cell,
   wherein said method comprises the prevention, prophylaxis, amelioration, reduction and/or alleviation of adverse events associated with immunotherapy, particularly of cancer immunotherapy, more particularly of cytokine release syndrome (CRS) in a patient suffering from a neoplastic disease as defined in the preceding embodiment, particularly a patient who is at risk of developing CRS, wherein a first dose, optionally also at least one further dose, of said inhibitor is administered before administration of said antibody construct, and wherein at least one further dose of said inhibitor is administered following administration of said antibody construct, wherein the first dose of said inhibitor is administered within a first period before administration of the antibody construct, wherein optionally also said further dose of said inhibitor is administered within a second period before administration of the antibody construct, wherein another dose of said inhibitor is administered within a third period following administration of said antibody construct, wherein the further dose of said inhibitor is administered within a second period ranging from 30 minutes to 5 days prior to administration of the antibody construct.
   (xvi) The method of treating cancer with an antibody construct as defined above, particularly with a cancer immunotherapy, more particularly of CD33+ target cells, such as leukemia and/or lymphoma, particularly myeloid leukemia, more particularly AML, according to any one of embodiments (i) to (xv), wherein said method comprises the steps:
[0495] (a) Administering an inhibitor/antagonist of TNF/TNFR reducing TNF/TNFR signaling as defined in any of the foregoing sections,
[0496] (b) Administering an antibody construct that binds CD33 on a target cell and CD3 on a T cell,
   wherein said method comprises the prevention, prophylaxis, amelioration, reduction and/or alleviation of adverse events associated with immunotherapy, particularly of cancer immunotherapy, more particularly of cytokine release syndrome (CRS) in a patient suffering from a neoplastic disease as defined in the preceding embodiment, particularly a patient who is at risk of developing CRS, wherein a first dose, optionally also at least one further dose, of said inhibitor is administered before administration of said antibody construct, and wherein further dose of said inhibitor is administered following administration of said antibody construct, wherein the first dose of said inhibitor is administered within a first period before administration of the antibody construct, wherein optionally also said further dose of said inhibitor is administered within a second period before administration of the antibody construct, wherein another dose of said inhibitor is administered within a third period following administration of said antibody construct, wherein the further dose of said inhibitor is administered within a period ranging from 30 minutes to 4 days prior to administration of the antibody construct.
   (xvii) The method of treating cancer with an antibody construct as defined above, particularly with a cancer immunotherapy, more particularly of CD33+ target cells, such as leukemia and/or lymphoma, particularly myeloid leukemia, more particularly AML, according to any one of embodiments (i) to (xvi), wherein said method comprises the steps:
[0497] (a) Administering an inhibitor/antagonist of TNF/TNFR reducing TNF/TNFR signaling as defined in any of the foregoing sections,
[0498] (b) Administering an antibody construct that binds CD33 on a target cell and CD3 on a T cell, wherein said method comprises the prevention, prophylaxis, amelioration, reduction and/or alleviation of adverse events associated with immunotherapy, particularly of cancer immunotherapy, more particularly of cytokine release syndrome (CRS) in a patient suffering from a neoplastic disease as defined in the preceding embodiment, particularly a patient who is at risk of developing CRS, wherein a first dose, optionally also at least one further dose, of said inhibitor is administered before administration of said antibody construct, and wherein at least one further dose of said inhibitor is administered following administration of said antibody construct, wherein the first dose of said inhibitor is administered within a first period before administration of the antibody construct, wherein optionally also said further dose of said inhibitor is administered within a second period before administration of the antibody construct, wherein another dose of said inhibitor is administered within a third period following administration of said antibody construct, wherein the further dose of said inhibitor is administered within a period ranging from 30 minutes to 3 days prior to administration of the antibody construct.
   (xviii) The method of treating cancer with an antibody construct as defined above, particularly with a cancer immunotherapy, more particularly of CD33+ target cells, such as leukemia and/or lymphoma, particularly myeloid leukemia, more particularly AML, according to any one of embodiments (i) to (xvii), wherein said method comprises the steps:
[0499] (a) Administering an inhibitor/antagonist of TNF/TNFR reducing TNF/TNFR signaling as defined in any of the foregoing sections,
[0500] (b) Administering an antibody construct that binds CD33 on a target cell and CD3 on a T cell,
   wherein said method comprises the prevention, prophylaxis, amelioration, reduction and/or alleviation of adverse events associated with immunotherapy, particularly of cancer immunotherapy, more particularly of cytokine release syndrome (CRS) in a patient suffering from a neoplastic disease as defined in the preceding embodiment, particularly a patient who is at risk of developing CRS, wherein a first dose, optionally also at least one further dose, of said inhibitor is administered before administration of said antibody construct, and wherein at least one further dose of said inhibitor is administered following administration of said antibody construct, wherein the first dose of said inhibitor is administered within a first period before administration of the antibody construct, wherein optionally also said further dose of said inhibitor is administered within a second period before administration of the antibody construct, wherein another dose of said inhibitor is administered within a third period following administration of said antibody construct, wherein the further dose of said inhibitor is administered within a period ranging from minutes to 2 days prior to administration of the antibody construct.
   (xix) The method of treating cancer with an antibody construct as defined above, particularly with a cancer immunotherapy, more particularly of CD33+ target cells, such as leukemia and/or lymphoma, particularly myeloid leukemia, more particularly AML, according to any one of embodiments (i) to (xviii), wherein said method comprises the steps:
[0501] (a) Administering an inhibitor/antagonist of TNF/TNFR reducing TNF/TNFR signaling as defined in any of the foregoing sections,
[0502] (b) Administering an antibody construct that binds CD33 on a target cell and CD3 on a T cell,
   wherein said method comprises the prevention, prophylaxis, amelioration, reduction and/or alleviation of adverse events associated with immunotherapy, particularly of cancer immunotherapy, more particularly of cytokine release syndrome (CRS) in a patient suffering from a neoplastic disease as defined in the preceding embodiment, particularly a patient who is at risk of developing CRS, wherein a first dose, optionally also at least one further dose, of said inhibitor is administered before administration of said antibody construct, and wherein at least one further dose of said inhibitor is administered following administration of said antibody construct, wherein the first dose of said inhibitor is administered within a first period before administration of the antibody construct, wherein optionally also said further dose of said inhibitor is administered within a second period before administration of the antibody construct, wherein another dose of said inhibitor is administered within a third period following administration of said antibody construct, wherein the further dose of said inhibitor is administered within a period ranging from 30 minutes to 1 day prior to administration of the antibody construct.
   (xx) The method of treating cancer with an antibody construct as defined above, particularly with a cancer immunotherapy, more particularly of CD33+ target cells, such as leukemia and/or lymphoma, particularly myeloid leukemia, more particularly AML, according to any one of embodiments (i) to (xix), wherein said method comprises the steps:
[0503] (a) Administering an inhibitor/antagonist of TNF/TNFR reducing TNF/TNFR signaling as defined in any of the foregoing sections,
[0504] (b) Administering an antibody construct that binds CD33 on a target cell and CD3 on a T cell,
   wherein said method comprises the prevention, prophylaxis, amelioration, reduction and/or alleviation of adverse events associated with immunotherapy, particularly of cancer immunotherapy, more particularly of cytokine release syndrome (CRS) in a patient suffering from a neoplastic disease as defined in the preceding embodiment, particularly a patient who is at risk of developing CRS, wherein a first dose, optionally also at least one further dose, of said inhibitor is administered before administration of said antibody construct, and wherein at least one further dose of said inhibitor is administered following administration of said antibody construct, wherein the first dose of said inhibitor is administered within a first period before administration of the antibody construct, wherein optionally also said further dose of said inhibitor is administered within a second period before administration of the antibody construct, wherein another dose of said inhibitor is administered within a third period following administration of said antibody construct, wherein the first dose and at least one further dose of said inhibitor comprise different quantities of inhibitor and/or different quantities of the antibody construct.
   (xxi) The method of treating cancer with an antibody construct as defined above, particularly with a cancer immunotherapy, more particularly of CD33+ target cells, such as leukemia and/or lymphoma, particularly myeloid leukemia, more particularly AML, according to any one of embodiments (i) to (xx), wherein said method comprises the steps:
[0505] (a) Administering an inhibitor/antagonist of INF/TNFR reducing TNF/TNFR signaling as defined in any of the foregoing sections,
[0506] (b) Administering an antibody construct that binds CD33 on a target cell and CD3 on a T cell,
   wherein said method comprises the prevention, prophylaxis, amelioration, reduction and/or alleviation of adverse events associated with immunotherapy, particularly of cancer immunotherapy, more particularly of cytokine release syndrome (CRS) in a patient suffering from a neoplastic disease as defined in the preceding embodiment, particularly a patient who is at risk of developing CRS, wherein a first dose, optionally also at least one further dose, of said inhibitor is administered before administration of said antibody construct, and wherein at least one further dose of said inhibitor is administered following administration of said antibody construct, wherein the first dose of said inhibitor is administered within a first period before administration of the antibody construct, wherein optionally also said further dose of said inhibitor is administered within a second period before administration of the antibody construct, wherein another dose of said inhibitor is administered within a third period following administration of said antibody construct, wherein the first dose and at least one further dose of said inhibitor comprise identical quantities of inhibitor and/or identical quantities of the antibody construct.
   (xxii) The method of treating cancer with an antibody construct as defined above, particularly with a cancer immunotherapy, more particularly of CD33+ target cells, such as leukemia and/or lymphoma, particularly myeloid leukemia, more particularly AML, according to any one of embodiments (i) to (xxi), wherein said method comprises the steps:
[0507] (a) Administering an inhibitor/antagonist of TNF/TNFR reducing TNF/TNFR signaling as defined in any of the foregoing sections,
[0508] (b) Administering an antibody construct that binds CD33 on a target cell and CD3 on a T cell,
   wherein said method comprises the prevention, prophylaxis, amelioration, reduction and/or alleviation of adverse events associated with immunotherapy, particularly of cancer immunotherapy, more particularly of cytokine release syndrome (CRS) in a patient suffering from a neoplastic disease as defined in the preceding embodiment, particularly a patient who is at risk of developing CRS, wherein a first dose, optionally also at least one further dose, of said inhibitor is administered before administration of said antibody construct, and wherein at least one further dose of said inhibitor is administered following administration of said antibody construct, wherein the first dose of said inhibitor is administered within a first period before administration of the antibody construct, wherein optionally also said further dose of said inhibitor is administered within a second period before administration of the antibody construct, wherein another dose of said inhibitor is administered within a third period following administration of said antibody construct, wherein another dose of said inhibitor is administered following administration of said antibody construct within a period from 1 day to 7 days following a first administration of a dose of said antibody construct.
   (xxiii) The method of treating cancer with an antibody construct as defined above, particularly with a cancer immunotherapy, more particularly of CD33+ target cells, such as leukemia and/or lymphoma, particularly myeloid leukemia, more particularly AML, according to any one of embodiments (i) to (xxii), wherein said method comprises the steps:
[0509] (a) Administering an inhibitor/antagonist of TNF/TNFR reducing TNF/TNFR signaling as defined in any of the foregoing sections,
[0510] (b) Administering an antibody construct that binds CD33 on a target cell and CD3 on a T cell,
   wherein said method comprises the prevention, prophylaxis, amelioration, reduction and/or alleviation of adverse events associated with immunotherapy, particularly of cancer immunotherapy, more particularly of cytokine release syndrome (CRS) in a patient suffering from a neoplastic disease as defined in the preceding embodiment, particularly a patient who is at risk of developing CRS, wherein a first dose, optionally also at least one further dose, of said inhibitor is administered before administration of said antibody construct, and wherein further dose of said inhibitor is administered following administration of said antibody construct, wherein the first dose of said inhibitor is administered within a first period before administration of the antibody construct, wherein optionally also said further dose of said inhibitor is administered within a second period before administration of the antibody construct, wherein another dose of said inhibitor is administered within a third period following administration of said antibody construct, wherein another dose of said inhibitor is administered following administration of said antibody construct within a period from 1 day to 6 days following a first administration of a dose of said antibody construct.
   (xxiv) The method of treating cancer with an antibody construct as defined above, particularly with a cancer immunotherapy, more particularly of CD33+ target cells, such as leukemia and/or lymphoma, particularly myeloid leukemia, more particularly AML, according to any one of embodiments (i) to (xxiii), wherein said method comprises the steps:
[0511] (a) Administering an inhibitor/antagonist of TNF/TNFR reducing TNF/TNFR signaling as defined in any of the foregoing sections,
[0512] (b) Administering an antibody construct that binds CD33 on a target cell and CD3 on a T cell,
   wherein said method comprises the prevention, prophylaxis, amelioration, reduction and/or alleviation of adverse events associated with immunotherapy, particularly of cancer immunotherapy, more particularly of cytokine release syndrome (CRS) in a patient suffering from a neoplastic disease as defined in the preceding embodiment, particularly a patient who is at risk of developing CRS, wherein a first dose, optionally also at least one further dose, of said inhibitor is administered before administration of said antibody construct, and wherein at least one further dose of said inhibitor is administered following administration of said antibody construct, wherein the first dose of said inhibitor is administered within a first period before administration of the antibody construct, wherein optionally also said further dose of said inhibitor is administered within a second period before administration of the antibody construct, wherein another dose of said inhibitor is administered within a third period following administration of said antibody construct, wherein another dose of said inhibitor is administered following administration of said antibody construct within a period from 1 day to 5 days following a first administration of a dose of said antibody construct.
   (xxv) The method of treating cancer with an antibody construct as defined above, particularly with a cancer immunotherapy, more particularly of CD33+ target cells, such as leukemia and/or lymphoma, particularly myeloid leukemia, more particularly AML, according to any one of embodiments (i) to (xxiv), wherein said method comprises the steps:
[0513] (a) Administering an inhibitor/antagonist of TNF/TNFR reducing TNF/TNFR signaling as defined in any of the foregoing sections,
[0514] (b) Administering an antibody construct that binds CD33 on a target cell and CD3 on a T cell,
   wherein said method comprises the prevention, prophylaxis, amelioration, reduction and/or alleviation of adverse events associated with immunotherapy, particularly of cancer immunotherapy, more particularly of cytokine release syndrome (CRS) in a patient suffering from a neoplastic disease as defined in the preceding embodiment, particularly a patient who is at risk of developing CRS, wherein a first dose, optionally also at least one further dose, of said inhibitor is administered before administration of said antibody construct, and wherein at least one further dose of said inhibitor is administered following administration of said antibody construct, wherein the first dose of said inhibitor is administered within a first period before administration of the antibody construct, wherein optionally also said further dose of said inhibitor is administered within a second period before administration of the antibody construct, wherein another dose of said inhibitor is administered within a third period following administration of said antibody construct, wherein another dose of said inhibitor is administered following administration of said antibody construct within a period from 1 day to 4 days following a first administration of a dose of said antibody construct.
   (xxvi) The method of treating cancer with an antibody construct as defined above, particularly with a cancer immunotherapy, more particularly of CD33+ target cells, such as leukemia and/or lymphoma, particularly myeloid leukemia, more particularly AML, according to any one of embodiments (i) to (xxv), wherein said method comprises the steps:
[0515] (a) Administering an inhibitor/antagonist of TNF/TNFR reducing TNF/TNFR signaling as defined in any of the foregoing sections,
[0516] (b) Administering an antibody construct that binds CD33 on a target cell and CD3 on a T cell,
   wherein said method comprises the prevention, prophylaxis, amelioration, reduction and/or alleviation of adverse events associated with immunotherapy, particularly of cancer immunotherapy, more particularly of cytokine release syndrome (CRS) in a patient suffering from a neoplastic disease as defined in the preceding embodiment, particularly a patient who is at risk of developing CRS, wherein a first dose, optionally also at least one further dose, of said inhibitor is administered before administration of said antibody construct, and wherein at least one further dose of said inhibitor is administered following administration of said antibody construct, wherein the first dose of said inhibitor is administered within a first period before administration of the antibody construct, wherein optionally also said further dose of said inhibitor is administered within a second period before administration of the antibody construct, wherein another dose of said inhibitor is administered within a third period following administration of said antibody construct, wherein another dose of said inhibitor is administered following administration of said antibody construct within a period from 1 day to 3 days following a first administration of a dose of said antibody construct.
   (xxvii) The method of treating cancer with an antibody construct as defined above, particularly with a cancer immunotherapy, more particularly of CD33+ target cells, such as leukemia and/or lymphoma, particularly myeloid leukemia, more particularly AML, according to any one of embodiments (i) to (xxvi), wherein said method comprises the steps:
[0517] (a) Administering an inhibitor/antagonist of TNF/TNFR reducing TNF/TNFR signaling as defined in any of the foregoing sections,
[0518] (b) Administering an antibody construct that binds CD33 on a target cell and CD3 on a T cell,
   wherein said method comprises the prevention, prophylaxis, amelioration, reduction and/or alleviation of adverse events associated with immunotherapy, particularly of cancer immunotherapy, more particularly of cytokine release syndrome (CRS) in a patient suffering from a neoplastic disease as defined in the preceding embodiment, particularly a patient who is at risk of developing CRS, wherein a first dose, optionally also at least one further dose, of said inhibitor is administered before administration of said antibody construct, and wherein at least one further dose of said inhibitor is administered following administration of said antibody construct, wherein the first dose of said inhibitor is administered within a first period before administration of the antibody construct, wherein optionally also said further dose of said inhibitor is administered within a second period before administration of the antibody construct, wherein another dose of said inhibitor is administered within a third period following administration of said antibody construct, wherein another dose of said inhibitor is administered following administration of said antibody construct within a period from 1 day to 2 days following a first administration of a dose of said antibody construct.
   (xxviii) The method of treating cancer with an antibody construct as defined above, particularly with a cancer immunotherapy, more particularly of CD33+ target cells, such as leukemia and/or lymphoma, particularly myeloid leukemia, more particularly AML, according to any one of embodiments (i) to (xxvii), wherein the domain of the antibody construct used in accordance with the present invention that binds to CD33 comprises a VL region comprising CDR-L1, CDR-L2 and CDR-L3 selected from: CDR-L1 as depicted in SEQ ID NO: 317, CDR-L2 as depicted in SEQ ID NO: 318, and CDR-L3 as depicted in SEQ ID NO: 319, which is preferred; CDR-L1 as depicted in SEQ ID NO: 320, CDR-L2 as depicted in SEQ ID NO: 318, and CDR-L3 as depicted in SEQ ID NO: 319; CDR-L1 as depicted in SEQ ID NO: 317, CDR-L2 as depicted in SEQ ID NO: 321, and CDR-L3 as depicted in SEQ ID NO: 319; and CDR-L1 as depicted in SEQ ID NO: 322, CDR-L2 as depicted in SEQ ID NO: 318, and CDR-L3 as depicted in SEQ ID NO: 319.
   (xxix) The method of treating cancer with an antibody construct as defined above, particularly with a cancer immunotherapy, more particularly of CD33+ target cells, such as leukemia and/or lymphoma, particularly myeloid leukemia, more particularly AML, according to any one of embodiments (i) to (xxviii), wherein the domain which binds to CD33 comprises a VH region comprising CDR-H1, CDR-H2 and CDR-H3 selected from: CDR-H1 as depicted in SEQ ID NO: 323, CDR-H2 as depicted in SEQ ID NO: 324, and CDR-H3 as depicted in SEQ ID NO: 325, which is preferred; CDR-H1 as depicted in SEQ ID NO: 323, CDR-H2 as depicted in SEQ ID NO: 326, and CDR-H3 as depicted in SEQ ID NO: 325; and CDR-H1 as depicted in SEQ ID NO: 323; CDR-H2 as depicted in SEQ ID NO: 327, and CDR-H3 as depicted in SEQ ID NO: 325.
   (xxx) The method of treating cancer with an antibody construct as defined above, particularly with a cancer immunotherapy, more particularly of CD33+ target cells, such as leukemia and/or lymphoma, particularly myeloid leukemia, more particularly AML, according to any one of embodiments (i) to (xxix), wherein the domain which binds to CD33 comprises a VL region comprising CDR-L1, CDR-L2 and CDR-L3 and a VH region comprising CDR-H1, CDR-H2 and CDR-H3 selected from: CDR-L1 as depicted in SEQ ID NO: 317, CDR-L2 as depicted in SEQ ID NO: 318, CDR-L3 as depicted in SEQ ID NO: 319, and CDR-H1 as depicted in SEQ ID NO: 323, CDR-H2 as depicted in SEQ ID NO: 324, and CDR-H3 as depicted in SEQ ID NO: 325, which is preferred; CDR-L1 as depicted in SEQ ID NO: 320, CDR-L2 as depicted in SEQ ID NO: 318, CDR-L3 as depicted in SEQ ID NO: 319, and CDR-H1 as depicted in SEQ ID NO: 323, CDR-H2 as depicted in SEQ ID NO: 324, and CDR-H3 as depicted in SEQ ID NO: 325; CDR-L1 as depicted in SEQ ID NO: 317, CDR-L2 as depicted in SEQ ID NO: 321, CDR-L3 as depicted in SEQ ID NO: 319; and CDR-H1 as depicted in SEQ ID NO: 323, CDR-H2 as depicted in SEQ ID NO: 324, and CDR-H3 as depicted in SEQ ID NO: 325; CDR-L1 as depicted in SEQ ID NO: 322, CDR-L2 as depicted in SEQ ID NO: 318, CDR-L3 as depicted in SEQ ID NO: 319, and CDR-H1 as depicted in SEQ ID NO: 323, CDR-H2 as depicted in SEQ ID NO: 324, and CDR-H3 as depicted in SEQ ID NO: 325; CDR-L1 as depicted in SEQ ID NO: 317, CDR-L2 as depicted in SEQ ID NO: 318, CDR-L3 as depicted in SEQ ID NO: 319, and CDR-H1 as depicted in SEQ ID NO: 323, CDR-H2 as depicted in SEQ ID NO: 326, and CDR-H3 as depicted in SEQ ID NO: 325; CDR-L1 as depicted in SEQ ID NO: 320, CDR-L2 as depicted in SEQ ID NO: 318, CDR-L3 as depicted in SEQ ID NO: 319, and CDR-H1 as depicted in SEQ ID NO: 323, CDR-H2 as depicted in SEQ ID NO: 326, and CDR-H3 as depicted in SEQ ID NO: 325; CDR-L1 as depicted in SEQ ID NO: 317, CDR-L2 as depicted in SEQ ID NO: 321, CDR-L3 as depicted in SEQ ID NO: 319; and CDR-H1 as depicted in SEQ ID NO: 323, CDR-H2 as depicted in SEQ ID NO: 326, and CDR-H3 as depicted in SEQ ID NO: 325; CDR-L1 as depicted in SEQ ID NO: 322, CDR-L2 as depicted in SEQ ID NO: 318, CDR-L3 as depicted in SEQ ID NO: 319, and CDR-H1 as depicted in SEQ ID NO: 323, CDR-H2 as depicted in SEQ ID NO: 326, and CDR-H3 as depicted in SEQ ID NO: 325; CDR-L1 as depicted in SEQ ID NO: 317, CDR-L2 as depicted in SEQ ID NO: 318, CDR-L3 as depicted in SEQ ID NO: 319, and CDR-H1 as depicted in SEQ ID NO: 323; CDR-H2 as depicted in SEQ ID NO: 327, and CDR-H3 as depicted in SEQ ID NO: 325; CDR-L1 as depicted in SEQ ID NO: 320, CDR-L2 as depicted in SEQ ID NO: 318, CDR-L3 as depicted in SEQ ID NO: 319, and CDR-H1 as depicted in SEQ ID NO: 323; CDR-H2 as depicted in SEQ ID NO: 327, and CDR-H3 as depicted in SEQ ID NO: 325; CDR-L1 as depicted in SEQ ID NO: 317, CDR-L2 as depicted in SEQ ID NO: 321, CDR-L3 as depicted in SEQ ID NO: 319; and CDR-H1 as depicted in SEQ ID NO: 323; CDR-H2 as depicted in SEQ ID NO: 327, and CDR-H3 as depicted in SEQ ID NO: 325; CDR-L1 as depicted in SEQ ID NO: 322, CDR-L2 as depicted in SEQ ID NO: 318, CDR-L3 as depicted in SEQ ID NO: 319, and CDR-H1 as depicted in SEQ ID NO: 323; CDR-H2 as depicted in SEQ ID NO: 327, and CDR-H3 as depicted in SEQ ID NO: 325.
   (xxxi) The method of treating cancer with an antibody construct as defined above, particularly with a cancer immunotherapy, more particularly of CD33+ target cells, such as leukemia and/or lymphoma, particularly myeloid leukemia, more particularly AML, according to any one of embodiments (i) to (xxx), wherein the domain which binds to CD33 comprises a VL region selected from the group of VL regions depicted in any one of SEQ ID NOs 328, 329, 330, 331, and 332.
   (xxxii) The method of treating cancer with an antibody construct as defined above, particularly with a cancer immunotherapy, more particularly of CD33+ target cells, such as leukemia and/or lymphoma, particularly myeloid leukemia, more particularly AML, according to any one of embodiments (i) to (xxxi), wherein the domain which binds to CD33 comprises a VH region selected from the group of VH regions depicted in any one of SEQ ID Nos. 333, 334, 335, 336, 337, 338 and 339.
   (xxxiii) The method of treating cancer with an antibody construct as defined above, particularly with a cancer immunotherapy, more particularly of CD33+ target cells, such as leukemia and/or lymphoma, particularly myeloid leukemia, more particularly AML, according to any one of embodiments (i) to (xxxii), wherein the domain which binds to CD33 comprises a pair comprising a VL region and a VH region selected from the group consisting of a VL region and a VH region as depicted in SEQ ID Nos: 328+333, 328+334, 328+335, 328+336, 328+337, 328+338, 328+339, 329+333, 329+334, 329+335, 329+336, 329+337, 329+338, 329+339, 330+333, 330+334, 330+335, 330+336, 330+337, 330+338, 330+339, 331+333, 331+333, 331+334, 331+335, 331+336, 331+337, 331+338, 331+339, 332+333, 332+334, 332+335, 332+336, 332+337, 332+338, and 332+339.
   (xxxiv) The method of treating cancer with an antibody construct as defined above, particularly with a cancer immunotherapy, more particularly of CD33+ target cells, such as leukemia and/or lymphoma, particularly myeloid leukemia, more particularly AML, according to any one of embodiments (i) to (xxxiii), wherein a domain which binds to CD33 comprising a VL region and a VH region consisting a VL region as depicted in of SEQ ID NOs 328, 329, 330, 331, and 332, and a VH region as depicted in SEQ ID NO: 333, 334, 335, 336, 337, 338 and 339, or with an antibody construct having a domain which binds to CD33 comprises a VL region comprising CDR-L1, CDR-L2 and CDR-L3 selected from: CDR-L1 as depicted in SEQ ID NO: 317, CDR-L2 as depicted in SEQ ID NO: 318, and CDR-L3 as depicted in SEQ ID NO: 319, which is preferred; CDR-L1 as depicted in SEQ ID NO: 320, CDR-L2 as depicted in SEQ ID NO: 318, and CDR-L3 as depicted in SEQ ID NO: 319; CDR-L1 as depicted in SEQ ID NO: 317, CDR-L2 as depicted in SEQ ID NO: 321, and CDR-L3 as depicted in SEQ ID NO: 319; CDR-L1 as depicted in SEQ ID NO: 322, CDR-L2 as depicted in SEQ ID NO: 318, and CDR-L3 as depicted in SEQ ID NO: 319; and a VH region comprising CDR-H1, CDR-H2 and CDR-H3 selected from: CDR-H1 as depicted in SEQ ID NO: 323, CDR-H2 as depicted in SEQ ID NO: 324, and CDR-H3 as depicted in SEQ ID NO: 325, which is preferred; CDR-H1 as depicted in SEQ ID NO: 323, CDR-H2 as depicted in SEQ ID NO: 326, and CDR-H3 as depicted in SEQ ID NO: 325; and CDR-H1 as depicted in SEQ ID NO: 323; CDR-H2 as depicted in SEQ ID NO: 327, and CDR-H3 as depicted in SEQ ID NO: 325.
   (xxxv) The method of treating cancer with an antibody construct as defined above, particularly with a cancer immunotherapy, more particularly of CD33+ target cells, such as leukemia and/or lymphoma, particularly myeloid leukemia, more particularly AML, according to any one of embodiments (i) to (xxxiv), wherein a domain which binds to CD33 competes for binding to an epitope of CD33 with an antibody construct that binds to CD33, wherein said competing antibody construct that binds to CD33 may have VL and/or VH regions that differ in their amino acid sequence(s) from the said antibody constructs as defined in the preceding embodiments, when both, the competing antibody constructs and the antibody constructs as defined in the preceding embodiments are co-incubated in a competition assay with target cells that express CD33, wherein both, competition antibody construct and antibody constructs as defined in the preceding embodiments are used at equimolar concentrations in such competition assays, wherein the competition antibody construct may be labelled and the antibody constructs as defined in the preceding embodiments may be unlabeled or differently labelled to permit a quantification to be able to distinguish the number of competition antibody construct bound to the target antigen at the end of the competition assay method, and/or wherein the amount/number of competition antibody construct that binds under such circumstances to the target is at least 50%, at least 60%, at least 70%, at least 80%, at least 90%, preferably at least 95% of all antibody constructs selectively binding to the target antigen, and/or wherein the competition antibody construct may comprise one or more, e.g. at least 2, 3, 4, 5, 6, 7, 8, 9, 10, 11, 12, 13, 14, 15, 16, 17, 18, 19, 20 or even more amino acid residues that are different from the antibody constructs as defined in the preceding embodiments.
   (xxxvi) The method of treating cancer with an antibody construct as defined above, particularly with a cancer immunotherapy, more particularly of CD33+ target cells, such as leukemia and/or lymphoma, particularly myeloid leukemia, more particularly AML, according to any one of embodiments (i) to (xxxv), wherein the competition antibody constructs have at least 1, 2, 3, 4, 5, 6, 7, 8, 9, 10, or more amino acid residues that are different from the herein described antibody constructs that are characterized by a domain which binds to CD33 comprising a VL region and a VH region consisting of a VL region as depicted in any one of SEQ ID NOs 328, 329, 330, 331, and 332 and a VH region as depicted in any one of SEQ ID Nos. 333, 334, 335, 336, 337, 338 and 339, or with an antibody construct having a domain which binds to CD33 comprises a VL region comprising CDR-L1, CDR-L2 and CDR-L3 and a VH region comprising CDR-H1, CDR-H2 and CDR-H3 selected from the group of pairs comprising SEQ ID NOs: 328+333, 328+334, 328+335, 328+336, 328+337, 328+338, 328+339, 329+333, 329+334, 329+335, 329+336, 329+337, 329+338, 329+339, 330+333, 330+334, 330+335, 330+336, 330+337, 330+338, 330+339, 331+333, 331+333, 331+334, 331+335, 331+336, 331+337, 331+338, 331+339, 332+333, 332+334, 332+335, 332+336, 332+337, 332+338, and 332+339.
   (xxxvii) The method of treating cancer with an antibody construct as defined above, particularly with a cancer immunotherapy, more particularly of CD33+ target cells according to any one of embodiments (i) to (xxxvi), further comprising the prevention, prophylaxis, or reduction of adverse events associated with immunotherapy, particularly of a blood cell-related cancer immunotherapy, such as leukemia and/or lymphoma, particularly myeloid leukemia, more particularly AML, wherein an antibody construct is administered that comprises at least one domain (also referred to as “first domain”) which binds to CD33 on the surface of a target cell, and at least one other domain (also referred to as “second domain”) which binds to CD3, preferably human CD3, on the surface of a T cell, according to any one of embodiments (i) to (xvi) of general Aspect A) and as defined in Sub-Aspect B-2.

[0519] The method of treating cancer with an antibody construct as defined above, particularly with a cancer immunotherapy, more particularly of CD33+ target cells according to any one of embodiments (i) to (xxxvii), further comprising the prevention, prophylaxis, or reduction of adverse events associated with immunotherapy, particularly of a blood cell-related cancer immunotherapy, such as leukemia and/or lymphoma, particularly myeloid leukemia, more particularly AML, wherein an antibody construct is administered that comprises at least one domain which binds to CD33 on the surface of a target cell, and at least one other domain which binds to CD3, preferably human CD3, on the surface of a T cell, according to any one of embodiments (i) to (xvi) of general Aspect A) and as further defined in Sub-Aspect B-2, wherein said antibody construct binds to an epitope that is selectively bound by an antibody/antibody construct that has the VH chain and/or VL chain respectively, that are disclosed in WO2010052014, particularly in the sequence listing, which is hereby incorporated by reference. Further, the present invention relates to the method of treating cancer with an antibody construct as defined above, particularly with a cancer immunotherapy, more particularly of CD33+ target cells according to any one of the preceding embodiments, further comprising the prevention, prophylaxis, or reduction of adverse events associated with immunotherapy, particularly of a blood cell-related cancer immunotherapy, such as leukemia and/or lymphoma, particularly myeloid leukemia, more particularly AML, wherein an antibody construct is administered that comprises at least one domain which binds to CD33 on the surface of a target cell, and at least one other domain which binds to CD3, preferably human CD3, on the surface of a T cell, according to any one of embodiments (i) to (xiv) of general Aspect A) and as further defined in embodiments (i) to (iii) of Sub-Aspect B-2, wherein the domain which binds to CD33 comprises a VL region comprising CDR-L1, CDR-L2 and CDR-L3 selected from the group comprising: CDR-L1 as depicted in SEQ ID NO: 317, CDR-L2 as depicted in SEQ ID NO: 318, CDR-L3 as depicted in SEQ ID NO: 319, which is preferred; CDR-L1 as depicted in SEQ ID NO: 320, CDR-L2 as depicted in SEQ ID NO: 318, CDR-L3 as depicted in SEQ ID NO: 319; CDR-L1 as depicted in SEQ ID NO: 317, CDR-L2 as depicted in SEQ ID NO: 321, CDR-L3 as depicted in SEQ ID NO: 319; CDR-L1 as depicted in SEQ ID NO: 322, CDR-L2 as depicted in SEQ ID NO: 318, CDR-L3 as depicted in SEQ ID NO: 319; CDR-L1 as depicted in SEQ ID NO: 320, CDR-L2 as depicted in SEQ ID NO: 318, CDR-L3 as depicted in SEQ ID NO: 319; CDR-L1 as depicted in SEQ ID NO: 317, CDR-L2 as depicted in SEQ ID NO: 321, CDR-L3 as depicted in SEQ ID NO: 319; CDR-L1 as depicted in SEQ ID NO: 322, CDR-L2 as depicted in SEQ ID NO: 318, CDR-L3 as depicted in SEQ ID NO: 319; CDR-L1 as depicted in SEQ ID NO: 320, CDR-L2 as depicted in SEQ ID NO: 318, CDR-L3 as depicted in SEQ ID NO: 319; CDR-L1 as depicted in SEQ ID NO: 317, CDR-L2 as depicted in SEQ ID NO: 321, CDR-L3 as depicted in SEQ ID NO: 319; CDR-L1 as depicted in SEQ ID NO: 322, CDR-L2 as depicted in SEQ ID NO: 318, CDR-L3 as depicted in SEQ ID NO: 319.

(xxxviii) Further, the present invention relates to a method of treating cancer with an antibody construct as defined above, particularly with a cancer immunotherapy, more particularly of CD33+ target cells according to any one of any one of the preceding embodiments, further comprising the prevention, prophylaxis, or reduction of adverse events associated with immunotherapy, particularly of a blood cell-related cancer immunotherapy, such as leukemia and/or lymphoma, particularly myeloid leukemia, more particularly AML, wherein an antibody construct is administered that comprises at least one domain which binds to CD33 on the surface of a target cell, and at least one other domain which binds to CD3, preferably human CD3, on the surface of a T cell, according to any one of embodiments (i) to (xvi) of general Aspect A) and as further defined in embodiments of Sub-Aspect B-2, wherein the domain which binds to CD33 comprises a VH region comprising CDR-H1, CDR-H2 and CDR-H3 selected from the group comprising: CDR-H1 as depicted in SEQ ID NO: 323, CDR-H2 as depicted in SEQ ID NO: 324, and CDR-H3 as depicted in SEQ ID NO: 325, which is preferred; CDR-H1 as depicted in SEQ ID NO: 323, CDR-H2 as depicted in SEQ ID NO: 326, and CDR-H3 as depicted in SEQ ID NO: 325; CDR-H1 as depicted in SEQ ID NO: 323, CDR-H2 as depicted in SEQ ID NO: 326, and CDR-H3 as depicted in SEQ ID NO: 325; CDR-H1 as depicted in SEQ ID NO: 323, CDR-H2 as depicted in SEQ ID NO: 326, and CDR-H3 as depicted in SEQ ID NO: 325; CDR-H1 as depicted in SEQ ID NO: 323, CDR-H2 as depicted in SEQ ID NO: 326, and CDR-H3 as depicted in SEQ ID NO: 325; CDR-H1 as depicted in SEQ ID NO: 323; CDR-H2 as depicted in SEQ ID NO: 327, and CDR-H3 as depicted in SEQ ID NO: 325; CDR-H1 as depicted in SEQ ID NO: 323; CDR-H2 as depicted in SEQ ID NO: 327, and CDR-H3 as depicted in SEQ ID NO: 325; CDR-H1 as depicted in SEQ ID NO: 323; CDR-H2 as depicted in SEQ ID NO: 327, and CDR-H3 as depicted in SEQ ID NO: 325; and CDR-H1 as depicted in SEQ ID NO: 323; CDR-H2 as depicted in SEQ ID NO: 327, and CDR-H3 as depicted in SEQ ID NO: 325.
(xxxix) Further, the present invention relates to a method of treating cancer with an antibody construct as defined above, particularly with a cancer immunotherapy, more particularly of CD33+ target cells according to any one of any one of the preceding embodiments, further comprising the prevention, prophylaxis, or reduction of adverse events associated with immunotherapy, particularly of a blood cell-related cancer immunotherapy, such as leukemia and/or lymphoma, particularly myeloid leukemia, more particularly AML, wherein an antibody construct is administered that comprises at least one domain which binds to CD33 on the surface of a target cell, and at least one other domain which binds to CD3, preferably human CD3, on the surface of a T cell, according to any one of embodiments (i) to (xiv) of general Aspect A) and as further defined in embodiments of Sub-Aspect B-2, wherein the domain which binds to CD33 comprises a VL region comprising CDR-L1, CDR-L2 and CDR-L3 and a VH region comprising CDR-H1, CDR-H2 and CDR-H3 selected from: CDR-L1 as depicted in SEQ ID NO: 317, CDR-L2 as depicted in SEQ ID NO: 318, CDR-L3 as depicted in SEQ ID NO: 319, and CDR-H1 as depicted in SEQ ID NO: 323, CDR-H2 as depicted in SEQ ID NO: 324, and CDR-H3 as depicted in SEQ ID NO: 325, which is preferred; CDR-L1 as depicted in SEQ ID NO: 320, CDR-L2 as depicted in SEQ ID NO: 318, CDR-L3 as depicted in SEQ ID NO: 319, and CDR-H1 as depicted in SEQ ID NO: 323, CDR-H2 as depicted in SEQ ID NO: 324, and CDR-H3 as depicted in SEQ ID NO: 325; CDR-L1 as depicted in SEQ ID NO: 317, CDR-L2 as depicted in SEQ ID NO: 321, CDR-L3 as depicted in SEQ ID NO: 319; and CDR-H1 as depicted in SEQ ID NO: 323, CDR-H2 as depicted in SEQ ID NO: 324, and CDR-H3 as depicted in SEQ ID NO: 325; CDR-L1 as depicted in SEQ ID NO: 322, CDR-L2 as depicted in SEQ ID NO: 318, CDR-L3 as depicted in SEQ ID NO: 319, and CDR-H1 as depicted in SEQ ID NO: 323, CDR-H2 as depicted in SEQ ID NO: 324, and CDR-H3 as depicted in SEQ ID NO: 325; CDR-L1 as depicted in SEQ ID NO: 317, CDR-L2 as depicted in SEQ ID NO: 318, CDR-L3 as depicted in SEQ ID NO: 319, and CDR-H1 as depicted in SEQ ID NO: 323, CDR-H2 as depicted in SEQ ID NO: 326, and CDR-H3 as depicted in SEQ ID NO: 325; CDR-L1 as depicted in SEQ ID NO: 320, CDR-L2 as depicted in SEQ ID NO: 318, CDR-L3 as depicted in SEQ ID NO: 319, and CDR-H1 as depicted in SEQ ID NO: 323, CDR-H2 as depicted in SEQ ID NO: 326, and CDR-H3 as depicted in SEQ ID NO: 325; CDR-L1 as depicted in SEQ ID NO: 317, CDR-L2 as depicted in SEQ ID NO: 321, CDR-L3 as depicted in SEQ ID NO: 319; and CDR-H1 as depicted in SEQ ID NO: 323, CDR-H2 as depicted in SEQ ID NO: 326, and CDR-H3 as depicted in SEQ ID NO: 325; CDR-L1 as depicted in SEQ ID NO: 322, CDR-L2 as depicted in SEQ ID NO: 318, CDR-L3 as depicted in SEQ ID NO: 319, and CDR-H1 as depicted in SEQ ID NO: 323, CDR-H2 as depicted in SEQ ID NO: 326, and CDR-H3 as depicted in SEQ ID NO: 325; CDR-L1 as depicted in SEQ ID NO: 317, CDR-L2 as depicted in SEQ ID NO: 318, CDR-L3 as depicted in SEQ ID NO: 319, and CDR-H1 as depicted in SEQ ID NO: 323; CDR-H2 as depicted in SEQ ID NO: 327, and CDR-H3 as depicted in SEQ ID NO: 325; CDR-L1 as depicted in SEQ ID NO: 320, CDR-L2 as depicted in SEQ ID NO: 318, CDR-L3 as depicted in SEQ ID NO: 319, and CDR-H1 as depicted in SEQ ID NO: 323; CDR-H2 as depicted in SEQ ID NO: 327, and CDR-H3 as depicted in SEQ ID NO: 325; CDR-L1 as depicted in SEQ ID NO: 317, CDR-L2 as depicted in SEQ ID NO: 321, CDR-L3 as depicted in SEQ ID NO: 319; and CDR-H1 as depicted in SEQ ID NO: 323; CDR-H2 as depicted in SEQ ID NO: 327, and CDR-H3 as depicted in SEQ ID NO: 325; CDR-L1 as depicted in SEQ ID NO: 322, CDR-L2 as depicted in SEQ ID NO: 318, CDR-L3 as depicted in SEQ ID NO: 319, and CDR-H1 as depicted in SEQ ID NO: 323; CDR-H2 as depicted in SEQ ID NO: 327, and CDR-H3 as depicted in SEQ ID NO: 325.
(xl) Further, the present invention relates to a method of treating cancer with an antibody construct as defined above, more particularly of CD33+ target cells according to any one of any one of the preceding embodiments, further comprising the prevention, prophylaxis, or reduction of adverse events associated with immunotherapy, particularly of a blood cell-related cancer immunotherapy, such as leukemia and/or lymphoma, particularly myeloid leukemia, more particularly AML, wherein the adverse event associated with immunotherapy is increased cytokine release of TNF, MCP-1, and/or IL-6, particularly wherein the adverse event is cytokine release syndrome (CRS), wherein the adverse events may also include a neurological reaction, selected from the group comprising confusion, ataxia, disorientation, dysphasia, aphasia, speech impairment, cerebellar symptoms, tremor, apraxia, seizure, grand mal convulsion, palsy, and balance disorder.
(xli) Further, the present invention relates to a method of treating cancer with an antibody construct as defined above, particularly with a cancer immunotherapy, more particularly of CD33+ target cells according to any one of any one of the preceding embodiments, further comprising the prevention, prophylaxis, or reduction of adverse events associated with immunotherapy, particularly of a blood cell-related cancer immunotherapy, such as leukemia and/or lymphoma, particularly myeloid leukemia, more particularly AML, wherein the second domain of said antibody construct binds to CD3, preferably human CD3, epsilon and to Callithrix jacchus or Saimiri sciureus CD3 epsilon.
(xlii) Further, the present invention relates to a method of treating cancer with an antibody construct as defined above, particularly with a cancer immunotherapy, more particularly of CD33+ target cells according to any one of any one of the preceding embodiments, further comprising the prevention, prophylaxis, or reduction of adverse events associated with immunotherapy, particularly of a blood cell-related cancer immunotherapy, such as leukemia and/or lymphoma, particularly myeloid leukemia, more particularly AML, wherein
[0520] (a) the antibody construct is a single chain antibody construct,
[0521] (b) the first domain is in the format of an scFv,
[0522] (c) the second domain is in the format of an scFv,
[0523] (d) the first and the second domain are connected via a linker, and/or
[0524] (e) the antibody construct comprises a domain providing an extended serum half-life.
   (xliii) Further, the present invention relates to a method of treating cancer with an antibody construct as defined above, particularly with a cancer immunotherapy, more particularly of CD33+ target cells according to any one of any one of the preceding embodiments, further comprising the prevention, prophylaxis, or reduction of adverse events associated with immunotherapy, particularly of a blood cell-related cancer immunotherapy, such as leukemia and/or lymphoma, particularly myeloid leukemia, more particularly AML, wherein the inhibitor/antagonist of TNF/TNFR that reduces TNF/TNFR signaling is selected from the group comprising small molecules, biological molecules, antibodies and derivatives thereof, aptamers, and the like.
   (xliv) Further, the present invention relates to a method of treating cancer with an antibody construct as defined above, particularly with a cancer immunotherapy, more particularly of CD33+ target cells according to any one of any one of the preceding embodiments, further comprising the prevention, prophylaxis, or reduction of adverse events associated with immunotherapy, particularly of a blood cell-related cancer immunotherapy, such as leukemia and/or lymphoma, particularly myeloid leukemia, more particularly AML, wherein the inhibitor/antagonist of TNF/TNFR that reduces TNF/TNFR signaling is selected from the group of TNF inhibitors comprising etanercept, infliximab, adalimumab, certolizumab Pergol, and golimumab, particularly etanercept.
   (xlv) Further, the present invention relates to a method of treating cancer with an antibody construct as defined above, particularly in a cancer immunotherapy, more particularly immunotherapy of CD33+ target cells according to any one of any one of the preceding embodiments, further comprising the prevention, prophylaxis, or reduction of adverse events associated with immunotherapy, particularly of a blood cell-related cancer immunotherapy, such as leukemia and/or lymphoma, particularly myeloid leukemia, more particularly AML, comprising the administration to a patient at risk of developing adverse events or having an intolerance to at least one of a group comprising corticosteroids, IL-6-inhibitors, IL-6R-inhibitors, and/or TNF/TNFR inhibitors different from an inhibitor/antagonist of TNF/TNFR that reduces TNF/TNFR signaling according to any of the preceding embodiments.
   (xlvi) Further, the present invention relates to a method of treating cancer with an antibody construct as defined above, particularly in a cancer immunotherapy, more particularly immunotherapy of CD33+ target cells according to any one of any one of the preceding embodiments, further comprising the prevention, prophylaxis, or reduction of adverse events associated with immunotherapy, particularly of a blood cell-related cancer immunotherapy, such as leukemia and/or lymphoma, particularly myeloid leukemia, more particularly AML, according to any one of any one of the preceding embodiments, for a patient at risk of developing adverse events or having an intolerance to corticosteroids, particularly wherein the corticosteroid is dexamethasone.
   (xlvii) Further, the present invention relates to a method of treating cancer with an antibody construct as defined above, particularly in a cancer immunotherapy, more particularly immunotherapy of CD33+ target cells according to any one of any one of the preceding embodiments, further comprising the prevention, prophylaxis, or reduction of adverse events associated with immunotherapy, particularly of a blood cell-related cancer immunotherapy, such as leukemia and/or lymphoma, particularly myeloid leukemia, more particularly AML, for administration for a patient at risk of developing adverse events or having an intolerance to IL-6-antagonists and/or IL-6R-antagonists, wherein the IL-6-antagonists and/or IL-6R-antagonists are selected from the group comprising tocilizumab, siltuximab, olokizumab, elsilimomab, clazakizumab, sirukumab, particularly tocilizumab, and/or wherein said combination product is for administration to a patient at risk of developing adverse events or having an intolerance to TNF/TNFR inhibitors, wherein the TNF/TNFR inhibitor is selected from the group comprising infliximab, adalimumab, certolizumab Pergol, and/or golimumab.
   (xlviii) Further, the present invention relates to a method of treating cancer with an antibody construct as defined above, particularly in a cancer immunotherapy, more particularly immunotherapy of CD33+ target cells according to any one of any one of the preceding embodiments, further comprising the prevention, prophylaxis, or reduction of adverse events associated with immunotherapy, particularly of a blood cell-related cancer immunotherapy, such as leukemia and/or lymphoma, particularly myeloid leukemia, more particularly AML, for administration for a patient at risk of developing adverse events or having an intolerance to IL-6-antagonists and/or IL-6R-antagonists, further comprising administering at least one corticosteroid, particularly wherein said corticostoid is dexamethasone.
   (xlix) Further, the present invention relates to a method of treating cancer with an antibody construct as defined above, particularly in a cancer immunotherapy, more particularly immunotherapy of CD33+ target cells according to any one of any one of the preceding embodiments, further comprising the prevention, prophylaxis, or reduction of adverse events associated with immunotherapy, particularly of a blood cell-related cancer immunotherapy, such as leukemia and/or lymphoma, particularly myeloid leukemia, more particularly AML, according to any one of any one of the preceding embodiments, for a patient at risk of developing adverse events or having an intolerance to corticosteroids, particularly wherein the corticosteroid is dexamethasone, further comprising administering an IL-6R-antagonist, particularly wherein said IL-6R-antagonist is tocilizumab.
   (l) Further, the present invention relates to a method of treating cancer with an antibody construct as defined above, particularly in a cancer immunotherapy, more particularly immunotherapy of CD33+ target cells according to any one of any one of the preceding embodiments, further comprising the prevention, prophylaxis, or reduction of adverse events associated with immunotherapy, particularly of a blood cell-related cancer immunotherapy, such as leukemia and/or lymphoma, particularly myeloid leukemia, more particularly AML, according to the preceding embodiments, further comprising administering at least one corticosteroid, particularly dexamethasone and/or at least one IL-6 and/or IL-6R-antagonist, particularly tocilizumab, wherein said at least one corticosteroid and/or said IL-6 and/or IL-6R-antagonist is for administration to a patient in need thereof prior to, concomitant with, and/or after administration of said antibody construct.
   (li) In preferred embodiments of the any of the above dosing regimens, the antibody constructs correspond to those as defined above, particularly wherein the antibody construct is used in a cancer immunotherapy, more particularly immunotherapy of CD33+ target cells according to any one of any one of the preceding embodiments, further comprising the prevention, prophylaxis, or reduction of adverse events associated with immunotherapy, particularly of a blood cell-related cancer immunotherapy, such as leukemia and/or lymphoma, particularly myeloid leukemia, more particularly AML, and wherein the antibody construct is administered according to the dosing schemes as published in WO2020025532, particularly according to the claims as filed, and as disclosed explicitly on pages 3 to 8 of the description, which are incorporated herein by reference, more particularly wherein the antibody construct is administered in at least one of the one or more treatment cycles according to a schedule comprising the following steps:
[0525] (a) administration of a first dosage of the antibody construct, followed by
[0526] (b) administration of a second dosage of the antibody construct, wherein said second dosage exceeds said first dose, followed by
[0527] (c) administration of a third dosage of the antibody construct, wherein said third dosage exceeds said second dosage, optionally also followed by
[0528] (d) administration of a fourth dosage of the antibody construct, wherein said optional fourth dose exceeds said third dosage.
   (lii) In preferred embodiments of any of the above embodiments relating to dosing regimens, the antibody construct is administered in one treatment cycle of at least 15 days, preferably 15 to 60 days, more preferably 28 to 56 days, preferably 28 days.
   (liii) In preferred embodiments of any of the above dosing regimens, the antibody construct is administered in a first dosage in step (a) is at least μg per day, preferably in the range of 5 to 20 mg per day, more preferably 10 μg per day, the second dosage in step (b) is at least 30 μg per day, preferably in the range of 30 to 240 μg per day, more preferably 60 or 240 mg per day and the third dosage in step (c) and the optional forth dosage in step (d) is at least 240 μs per day, preferably in the range of 240 to 1500 μg per day, preferably in the range of 240 to 960 μg per day, more preferably in the range of 480 to 960 μg per day.
   (liv) In preferred embodiments of any of the above dosing regimens, the period of administration of the first dosage in step (a) is 1 to 4 days, preferably 2 or 3 days, the period of administration of the second dosage in step (b) is 2 to 5 days, preferably 2 or 3 days, and the period of administration of the third dosage in step (c) and the optional forth dosage in step (d) together is 7 to 52 days, preferably 14 to 52 days, more preferably 22, 23 or 52 days.
   (lv) In preferred embodiments of any of the above dosing regimens, the treatment of the myeloid leukemia comprises two or more treatment cycles, preferably two, three, four, five, six or seven treatment cycles, whereof at least one, two, three, four five, six or seven treatment cycles comprise more than 14 days of bispecific antibody construct administration.
   (lvi) In preferred embodiments of any of the above dosing regimens, at least one treatment cycle is followed by the period without administration of the construct, preferably at least 1, 2, 3, 4, 5, 6, 7, 8, 9, 10, 11, 12, 13 or 14 days without treatment.
   (lvii) In preferred embodiments of any of the above dosing regimens, at least one treatment cycle is not followed by the period without administration of the construct.
   (lviii) In preferred embodiments of any of the above dosing regimens, only the first cycle of the treatment comprises the administration according to step (a), whereas the following cycles start with the dose according to step (b).
   (lix) In preferred embodiments of any of the above dosing regimens, the construct is a single chain bispecific antibody construct.
   (lx) In preferred embodiments of any of the above dosing regimens, the first binding domain of the bispecific antibody construct comprises groups of six CDRs selected from the group consisting of SEQ ID NOs: 10 to 12 and 14 to 16, 22 to 24 and 26 to 28, 34 to 36 and 38 to 40, 46 to 48 and 50 to 52, 58 to 60 and 62 to 64, 70 to 72 and 74 to 76, 82 to 84 and 86 to 88, 94 to 96 an 98 to 100, preferably 94 to 96 an 98 to 100 disclosed in WO2020025532.
   (lxi) In preferred embodiments of any of the above dosing regimens, the second binding domain of the bispecific antibody construct comprises groups of six CDRs selected from the group consisting of SEQ ID NOs: 148-153, 154-159, 160-165, 166-171, 172-177, 178-183, 184-189, 190-195, 196-201 and 202-207, preferably 202-207 disclosed in WO2020025532.
   (lxii) In further embodiments of the above dosing regimes, the antibody construct is a single chain construct comprising an amino acid sequence selected from the group consisting of SEQ ID NOs: 18, 19, 20, 30, 31, 32, 42, 43, 44, 54, 55, 56, 66, 67, 68, 78, 79, 80, 90, 91, 92, 102, 103, 104, 105, 106, 107 and 108, preferably selected from the group consisting of SEQ ID NOs: 104, 105, 106, 107 and 108, more preferably SEQ ID NO 104 disclosed in WO2020025532.
   Sub-Aspect F-3—Dosing of an TNF/TNFR Inhibitor/Antagonist Together with Antibody Constructs Binding FLT3

[0529] The present invention relates also to a method/a use of an inhibitor/antagonist of TNF/TNFR that reduces TNF/TNFR signaling as defined in any of the foregoing embodiments (i) to (xvi) in general Aspect A for the treatment of FLT3+ cancers and for the prevention of adverse events associated with immunotherapy, particularly of cancer immunotherapy, very particularly of CRS, in accordance with any of the methods as defined explicitly in Aspect B, particularly in Sub-Aspect B-3, in a patient, particularly a patient who is at risk of CRS as defined in the preceding embodiments, wherein said patient is a person subjected to therapy with an antibody construct comprising a first domain which binds to a target antigen on the surface of a target cell, and a second domain which binds to CD3, preferably human CD3, on the surface of a T cell as defined in any of the foregoing embodiments, wherein a first dose of said inhibitor is administered before administration of a first dose of said antibody construct, and wherein said antibody construct binds to the target antigen FLT3. Embodiments of respective methods and dosing regimen are set forth below.

(i) A method of treating cancer with an antibody construct as defined above, particularly with a cancer immunotherapy, more particularly of FLT3+ target cells, such as leukemia and/or lymphoma, particularly myeloid leukemia such as AML, wherein said method comprises the steps:
[0530] (a) Administering an inhibitor/antagonist of TNF/TNFR reducing TNF/TNFR signaling as defined in any of the foregoing sections,
[0531] (b) Administering an antibody construct that binds FLT3 on a target cell and CD3 on a T cell, wherein a first dose of said inhibitor is administered before administration of a first dose of said antibody construct.
   (ii) The method of treating cancer with an antibody construct as defined above, particularly with a cancer immunotherapy, more particularly of FLT3+ target cells, such as leukemia and/or lymphoma, particularly myeloid leukemia, more particularly AML, according to embodiment (i), wherein said method comprises the steps:
[0532] (a) Administering an inhibitor/antagonist of TNF/TNFR reducing TNF/TNFR signaling as defined in any of the foregoing sections,
[0533] (b) Administering an antibody construct that binds FLT3 on a target cell and CD3 on a T cell,
   wherein said method comprises the prevention, prophylaxis, amelioration, reduction and/or alleviation of adverse events associated with immunotherapy, particularly of cancer immunotherapy, more particularly of cytokine release syndrome (CRS) in a patient as defined in the preceding embodiment, particularly a patient who is at risk of developing CRS.
   (iii) The method of treating cancer with an antibody construct as defined above, particularly with a cancer immunotherapy, more particularly of FLT3+ target cells, such as leukemia and/or lymphoma, particularly myeloid leukemia, more particularly AML, according to any one of embodiments (i) and (ii), wherein said method comprises the steps:
[0534] (a) Administering an inhibitor/antagonist of TNF/TNFR reducing TNF/TNFR signaling as defined in any of the foregoing sections,
[0535] (b) Administering an antibody construct that binds FLT3 on a target cell and CD3 on a T cell,
   wherein said method comprises the prevention, prophylaxis, amelioration, reduction and/or alleviation of adverse events associated with immunotherapy, particularly of cancer immunotherapy, more particularly of cytokine release syndrome (CRS) in a patient as defined in the preceding embodiment, particularly a patient who is at risk of developing CRS, wherein at least one further dose, particularly a second dose of said inhibitor is administered before administration of said antibody construct.
   (iv) The method of treating cancer with an antibody construct as defined above, particularly with a cancer immunotherapy, more particularly of FLT3+ target cells, such as leukemia and/or lymphoma, particularly myeloid leukemia, more particularly AML, according to any one of embodiments (i) to (iii), wherein said method comprises the steps:
[0536] (a) Administering an inhibitor/antagonist of TNF/TNFR reducing TNF/TNFR signaling as defined in any of the foregoing sections,
[0537] (b) Administering an antibody construct that binds FLT3 on a target cell and CD3 on a T cell,
   wherein said method comprises the prevention, prophylaxis, amelioration, reduction and/or alleviation of adverse events associated with immunotherapy, particularly of cancer immunotherapy, more particularly of cytokine release syndrome (CRS) in a patient as defined in the preceding embodiment, particularly a patient who is at risk of developing CRS, wherein a first dose, optionally also at least one further dose of said inhibitor is administered before administration of said antibody construct, and wherein at least one further dose of said inhibitor is administered following administration of said antibody construct.
   (v) The method of treating cancer with an antibody construct as defined above, particularly with a cancer immunotherapy, more particularly of FLT3+ target cells, such as leukemia and/or lymphoma, particularly myeloid leukemia, more particularly AML, according to any one of embodiments (i) to (iv), wherein said method comprises the steps:
[0538] (a) Administering an inhibitor/antagonist of TNF/TNFR reducing TNF/TNFR signaling as defined in any of the foregoing sections,
[0539] (b) Administering an antibody construct that binds FLT3 on a target cell and CD3 on a T cell,
   wherein said method comprises the prevention, prophylaxis, amelioration, reduction and/or alleviation of adverse events associated with immunotherapy, particularly of cancer immunotherapy, more particularly of cytokine release syndrome (CRS) in a patient as defined in the preceding embodiment, particularly a patient who is at risk of developing CRS, wherein a first dose, optionally also at least one further dose, of said inhibitor is administered before administration of said antibody construct, and wherein at least one further dose of said inhibitor is administered following administration of said antibody construct, wherein the first dose of said inhibitor is administered within a first period before administration of the antibody construct, wherein optionally also said at least one further dose of said inhibitor is administered within a second period before administration of the antibody construct, wherein at least one other dose of said inhibitor is administered within a third period following administration of said antibody construct.
   (vi) The method of treating cancer with an antibody construct as defined above, particularly with a cancer immunotherapy, more particularly of FLT3+ target cells, such as leukemia and/or lymphoma, particularly myeloid leukemia, more particularly AML, according to any one of embodiments (i) to (v), wherein said method comprises the steps:
[0540] (a) Administering an inhibitor/antagonist of TNF-alpha/TNF-alpha-Receptor reducing TNF-alpha/TNF-alpha-Receptor signaling as defined in any of the foregoing sections,
[0541] (b) Administering an antibody construct that binds FLT3 on a target cell and CD3 on a T cell,
   wherein said method comprises the prevention, prophylaxis, amelioration, reduction and/or alleviation of adverse events associated with immunotherapy, particularly of cancer immunotherapy, more particularly of cytokine release syndrome (CRS) in a patient as defined in the preceding embodiment, particularly a patient who is at risk of developing CRS, wherein a first dose, optionally also at least one further dose, of said inhibitor is administered before administration of said antibody construct, and wherein at least one further dose of said inhibitor is administered following administration of said antibody construct, wherein the first dose of said inhibitor is administered within a first period before administration of the antibody construct, wherein optionally also said at least one further dose of said inhibitor is administered within a second period before administration of the antibody construct, wherein at least one other dose of said inhibitor is administered within a third period following administration of said antibody construct, wherein the first dose of said inhibitor is administered within a first period before administration of the antibody construct, said period ranging from 30 minutes to 7 days prior to administration of the antibody construct.
   (vii) The method of treating cancer with an antibody construct as defined above, particularly with a cancer immunotherapy, more particularly of FLT3+ target cells, such as leukemia and/or lymphoma, particularly myeloid leukemia, more particularly AML, according to any one of embodiments (i) to (vi), wherein said method comprises the steps:
[0542] (a) Administering an inhibitor/antagonist of TNF-alpha/TNF-alpha-Receptor reducing TNF-alpha/TNF-alpha-Receptor signaling as defined in any of the foregoing sections,
[0543] (b) Administering an antibody construct that binds FLT3 on a target cell and CD3 on a T cell,
   wherein said method comprises the prevention, prophylaxis, amelioration, reduction and/or alleviation of adverse events associated with immunotherapy, particularly of cancer immunotherapy, more particularly of cytokine release syndrome (CRS) in a patient as defined in the preceding embodiments, particularly a patient who is at risk of developing CRS, wherein a first dose, optionally also at least one further dose, of said inhibitor is administered before administration of said antibody construct, and wherein at least one further dose of said inhibitor is administered following administration of said antibody construct, wherein the first dose of said inhibitor is administered within a first period before administration of the antibody construct, wherein optionally also said at least one further dose of said inhibitor is administered within a second period before administration of the antibody construct, wherein at least one other dose of said inhibitor is administered within a third period following administration of said antibody construct, wherein the first dose of said inhibitor is administered within a first period before administration of the antibody construct, said period ranging from 30 minutes to 6 days prior to administration of the antibody construct.
   (viii) The method of treating cancer with an antibody construct as defined above, particularly with a cancer immunotherapy, more particularly of FLT3+ target cells, such as leukemia and/or lymphoma, particularly myeloid leukemia, more particularly AML, according to any one of embodiments (i) to (vii), wherein said method comprises the steps:
[0544] (a) Administering an inhibitor/antagonist of TNF-alpha/TNF-alpha-Receptor reducing TNF-alpha/TNF-alpha-Receptor signaling as defined in any of the foregoing sections,
[0545] (b) Administering an antibody construct that binds FLT3 on a target cell and CD3 on a T cell,
   wherein said method comprises the prevention, prophylaxis, amelioration, reduction and/or alleviation of adverse events associated with immunotherapy, particularly of cancer immunotherapy, more particularly of cytokine release syndrome (CRS) in a patient suffering as defined in the preceding embodiments, particularly a patient who is at risk of developing CRS, wherein a first dose, optionally also at least one further dose, of said inhibitor is administered before administration of said antibody construct, and wherein at least one further dose of said inhibitor is administered following administration of said antibody construct, wherein the first dose of said inhibitor is administered within a first period before administration of the antibody construct, wherein optionally also said at least one further dose of said inhibitor is administered within a second period before administration of the antibody construct, wherein at least one other dose of said inhibitor is administered within a third period following administration of said antibody construct, wherein the first dose of said inhibitor is administered within a first period before administration of the antibody construct, said period ranging from 30 minutes to 5 days prior to administration of the antibody construct.
   (ix) The method of treating cancer with an antibody construct as defined above, particularly with a cancer immunotherapy, more particularly of FLT3+ target cells, such as leukemia and/or lymphoma, particularly myeloid leukemia, more particularly AML, according to any one of embodiments (i) to (viii), wherein said method comprises the steps:
[0546] (a) Administering an inhibitor/antagonist of TNF-alpha/TNF-alpha-Receptor reducing TNF-alpha/TNF-alpha-Receptor signaling as defined in any of the foregoing sections,
[0547] (b) Administering an antibody construct that binds FLT3 on a target cell and CD3 on a T cell,
   wherein said method comprises the prevention, prophylaxis, amelioration, reduction and/or alleviation of adverse events associated with immunotherapy, particularly of cancer immunotherapy, more particularly of cytokine release syndrome (CRS) in a patient as defined in the preceding embodiments, particularly a patient who is at risk of developing CRS, wherein a first dose, optionally also at least one further dose, of said inhibitor is administered before administration of said antibody construct, and wherein at least one further dose of said inhibitor is administered following administration of said antibody construct, wherein the first dose of said inhibitor is administered within a first period before administration of the antibody construct, wherein optionally also said at least one further dose of said inhibitor is administered within a second period before administration of the antibody construct, wherein at least one other dose of said inhibitor is administered within a third period following administration of said antibody construct, wherein the first dose of said inhibitor is administered within a first period before administration of the antibody construct, said period ranging from 30 minutes to 4 days prior to administration of the antibody construct.
   (x) The method of treating cancer with an antibody construct as defined above, particularly with a cancer immunotherapy, more particularly of FLT3+ target cells, such as leukemia and/or lymphoma, particularly myeloid leukemia, more particularly AML, according to any one of embodiments (i) to (ix), wherein said method comprises the steps:
[0548] (a) Administering an inhibitor/antagonist of TNF-alpha/TNF-alpha-Receptor reducing TNF-alpha/TNF-alpha-Receptor signaling as defined in any of the foregoing sections,
[0549] (b) Administering an antibody construct that binds FLT3 on a target cell and CD3 on a T cell,
   wherein said method comprises the prevention, prophylaxis, amelioration, reduction and/or alleviation of adverse events associated with immunotherapy, particularly of cancer immunotherapy, more particularly of cytokine release syndrome (CRS) in a patient as defined in the preceding embodiments, particularly a patient who is at risk of developing CRS, wherein a first dose, optionally also at least one further dose, of said inhibitor is administered before administration of said antibody construct, and wherein at least one further dose of said inhibitor is administered following administration of said antibody construct, wherein the first dose of said inhibitor is administered within a first period before administration of the antibody construct, wherein optionally also said at least one further dose of said inhibitor is administered within a second period before administration of the antibody construct, wherein at least one other dose of said inhibitor is administered within a third period following administration of said antibody construct, wherein the first dose of said inhibitor is administered within a first period before administration of the antibody construct, said period ranging from 30 minutes to 3 days prior to administration of the antibody construct.
   (xi) The method of treating cancer with an antibody construct as defined above, particularly with a cancer immunotherapy, more particularly of FLT3+ target cells, such as leukemia and/or lymphoma, particularly myeloid leukemia, more particularly AML, according to any one of embodiments (i) to (x), wherein said method comprises the steps:
[0550] (a) Administering an inhibitor/antagonist of TNF-alpha/TNF-alpha-Receptor reducing TNF-alpha/TNF-alpha-Receptor signaling as defined in any of the foregoing sections,
[0551] (b) Administering an antibody construct that binds FLT3 on a target cell and CD3 on a T cell,
   wherein said method comprises the prevention, prophylaxis, amelioration, reduction and/or alleviation of adverse events associated with immunotherapy, particularly of cancer immunotherapy, more particularly of cytokine release syndrome (CRS) in a patient as defined in the preceding embodiment, particularly a patient who is at risk of developing CRS, wherein a first dose, optionally also at least one further dose, of said inhibitor is administered before administration of said antibody construct, and wherein at least one further dose of said inhibitor is administered following administration of said antibody construct, wherein the first dose of said inhibitor is administered within a first period before administration of the antibody construct, wherein optionally also said at least one further dose of said inhibitor is administered within a second period before administration of the antibody construct, wherein at least one other dose of said inhibitor is administered within a third period following administration of said antibody construct, wherein the first dose of said inhibitor is administered within a first period before administration of the antibody construct, said period ranging from 30 minutes to 2 days prior to administration of the antibody construct.
   (xii) The method of treating cancer with an antibody construct as defined above, particularly with a cancer immunotherapy, more particularly of FLT3+ target cells, such as leukemia and/or lymphoma, particularly myeloid leukemia, more particularly AML, according to any one of embodiments (i) to (xi), wherein said method comprises the steps:
[0552] (a) Administering an inhibitor/antagonist of TNF-alpha/TNF-alpha-Receptor reducing TNF-alpha/TNF-alpha-Receptor signaling as defined in any of the foregoing sections,
[0553] (b) Administering an antibody construct that binds FLT3 on a target cell and CD3 on a T cell,
   wherein said method comprises the prevention, prophylaxis, amelioration, reduction and/or alleviation of adverse events associated with immunotherapy, particularly of cancer immunotherapy, more particularly of cytokine release syndrome (CRS) in a patient s defined in the preceding embodiment, particularly a patient who is at risk of developing CRS, wherein a first dose, optionally also at least one further dose, of said inhibitor is administered before administration of said antibody construct, and wherein at least one further dose of said inhibitor is administered following administration of said antibody construct, wherein the first dose of said inhibitor is administered within a first period before administration of the antibody construct, wherein optionally also said at least one further dose of said inhibitor is administered within a second period before administration of the antibody construct, wherein at least one other dose of said inhibitor is administered within a third period following administration of said antibody construct, wherein the first dose of said inhibitor is administered within a first period before administration of the antibody construct, said period ranging from 30 minutes to 1 day prior to administration of the antibody construct.
   (xiii) The method of treating cancer with an antibody construct as defined above, particularly with a cancer immunotherapy, more particularly of FLT3+ target cells, such as leukemia and/or lymphoma, particularly myeloid leukemia, more particularly AML, according to any one of embodiments (i) to (xii), wherein said method comprises the steps:
[0554] (a) Administering an inhibitor/antagonist of TNF-alpha/TNF-alpha-Receptor reducing TNF-alpha/TNF-alpha-Receptor signaling as defined in any of the foregoing sections,
[0555] (b) Administering an antibody construct that binds FLT3 on a target cell and CD3 on a T cell,
   wherein said method comprises the prevention, prophylaxis, amelioration, reduction and/or alleviation of adverse events associated with immunotherapy, particularly of cancer immunotherapy, more particularly of cytokine release syndrome (CRS) in a patient as defined in the preceding embodiment, particularly a patient who is at risk of developing CRS, wherein a first dose, optionally also at least one further dose, of said inhibitor is administered before administration of said antibody construct, and wherein at least one further dose of said inhibitor is administered following administration of said antibody construct, wherein the first dose of said inhibitor is administered within a first period before administration of the antibody construct, wherein optionally also said at least one further dose of said inhibitor is administered within a second period before administration of the antibody construct, wherein at least one other dose of said inhibitor is administered within a third period following administration of said antibody construct, wherein the first dose of said inhibitor is administered within a first period before administration of the antibody construct, said period ranging from 60 minutes to 1 day prior to administration of the antibody construct.
   (xiv) The method of treating cancer with an antibody construct as defined above, particularly with a cancer immunotherapy, more particularly of FLT3+ target cells, such as leukemia and/or lymphoma, particularly myeloid leukemia, more particularly AML, according to any one of embodiments (i) to (xiii), wherein said method comprises the steps:
[0556] (a) Administering an inhibitor/antagonist of TNF-alpha/TNF-alpha-Receptor reducing TNF-alpha/TNF-alpha-Receptor signaling as defined in any of the foregoing sections,
[0557] (b) Administering an antibody construct that binds FLT3 on a target cell and CD3 on a T cell,
   wherein said method comprises the prevention, prophylaxis, amelioration, reduction and/or alleviation of adverse events associated with immunotherapy, particularly of cancer immunotherapy, more particularly of cytokine release syndrome (CRS) in a patient as defined in the preceding embodiments, particularly a patient who is at risk of developing CRS, wherein a first dose, optionally also at least one further dose, of said inhibitor is administered before administration of said antibody construct, and wherein at least one further dose of said inhibitor is administered following administration of said antibody construct, wherein the first dose of said inhibitor is administered within a first period before administration of the antibody construct, wherein optionally also said at least one further dose of said inhibitor is administered within a second period before administration of the antibody construct, wherein at least one other dose of said inhibitor is administered within a third period following administration of said antibody construct, wherein the further dose of said inhibitor is administered within a second period, for example within a second period before administration of the antibody construct, wherein said period is shorter than the first period of administration of the inhibitor.
   (xv) The method of treating cancer with an antibody construct as defined above, particularly with a cancer immunotherapy, more particularly of FLT3+ target cells, such as leukemia and/or lymphoma, particularly myeloid leukemia, more particularly AML, according to any one of embodiments (i) to (xvi), wherein said method comprises the steps:
[0558] (a) Administering an inhibitor/antagonist of TNF-alpha/TNF-alpha-Receptor reducing TNF-alpha/TNF-alpha-Receptor signaling as defined in any of the foregoing sections,
[0559] (b) Administering an antibody construct that binds FLT3 on a target cell and CD3 on a T cell,
   wherein said method comprises the prevention, prophylaxis, amelioration, reduction and/or alleviation of adverse events associated with immunotherapy, particularly of cancer immunotherapy, more particularly of cytokine release syndrome (CRS) in a patient as defined in the preceding embodiment, particularly a patient who is at risk of developing CRS, wherein a first dose, optionally also at least one further dose, of said inhibitor is administered before administration of said antibody construct, and wherein at least one further dose of said inhibitor is administered following administration of said antibody construct, wherein the first dose of said inhibitor is administered within a first period before administration of the antibody construct, wherein optionally also said at least one further dose of said inhibitor is administered within a second period before administration of the antibody construct, wherein at least one other dose of said inhibitor is administered within a third period following administration of said antibody construct, wherein the further dose of said inhibitor is administered within a second period ranging from 30 minutes to 5 days prior to administration of the antibody construct.
   (xvi) The method of treating cancer with an antibody construct as defined above, particularly with a cancer immunotherapy, more particularly of FLT3+ target cells, such as leukemia and/or lymphoma, particularly myeloid leukemia, more particularly AML, according to any one of embodiments (i) to (xv), wherein said method comprises the steps:
[0560] (a) Administering an inhibitor/antagonist of TNF-alpha/TNF-alpha-Receptor reducing TNF-alpha/TNF-alpha-Receptor signaling as defined in any of the foregoing sections,
[0561] (b) Administering an antibody construct that binds FLT3 on a target cell and CD3 on a T cell,
   wherein said method comprises the prevention, prophylaxis, amelioration, reduction and/or alleviation of adverse events associated with immunotherapy, particularly of cancer immunotherapy, more particularly of cytokine release syndrome (CRS) in a patient as defined in the preceding embodiments, particularly a patient who is at risk of developing CRS, wherein a first dose, optionally also at least one further dose, of said inhibitor is administered before administration of said antibody construct, and wherein at least one further dose of said inhibitor is administered following administration of said antibody construct, wherein the first dose of said inhibitor is administered within a first period before administration of the antibody construct, wherein optionally also said at least one further dose of said inhibitor is administered within a second period before administration of the antibody construct, wherein at least one other dose of said inhibitor is administered within a third period following administration of said antibody construct, wherein the further dose of said inhibitor is administered within a period ranging from 30 minutes to 4 days prior to administration of the antibody construct.
   (xvii) The method of treating cancer with an antibody construct as defined above, particularly with a cancer immunotherapy, more particularly of FLT3+ target cells, such as leukemia and/or lymphoma, particularly myeloid leukemia, more particularly AML, according to any one of embodiments (i) to (xvi), wherein said method comprises the steps:
[0562] (a) Administering an inhibitor/antagonist of TNF-alpha/TNF-alpha-Receptor reducing TNF-alpha/TNF-alpha-Receptor signaling as defined in any of the foregoing sections,
[0563] (b) Administering an antibody construct that binds FLT3 on a target cell and CD3 on a T cell,
   wherein said method comprises the prevention, prophylaxis, amelioration, reduction and/or alleviation of adverse events associated with immunotherapy, particularly of cancer immunotherapy, more particularly of cytokine release syndrome (CRS) in a patient as defined in the preceding embodiments, particularly a patient who is at risk of developing CRS, wherein a first dose, optionally also at least one further dose, of said inhibitor is administered before administration of said antibody construct, and wherein at least one further dose of said inhibitor is administered following administration of said antibody construct, wherein the first dose of said inhibitor is administered within a first period before administration of the antibody construct, wherein optionally also said at least one further dose of said inhibitor is administered within a second period before administration of the antibody construct, wherein at least one other dose of said inhibitor is administered within a third period following administration of said antibody construct, wherein the further dose of said inhibitor is administered within a period ranging from 30 minutes to 3 days prior to administration of the antibody construct.
   (xviii) The method of treating cancer with an antibody construct as defined above, particularly with a cancer immunotherapy, more particularly of FLT3+ target cells, such as leukemia and/or lymphoma, particularly myeloid leukemia, more particularly AML, according to any one of embodiments (i) to (xvii), wherein said method comprises the steps:
[0564] (a) Administering an inhibitor/antagonist of TNF-alpha/TNF-alpha-Receptor reducing TNF-alpha/TNF-alpha-Receptor signaling as defined in any of the foregoing sections,
[0565] (b) Administering an antibody construct that binds FLT3 on a target cell and CD3 on a T cell,
   wherein said method comprises the prevention, prophylaxis, amelioration, reduction and/or alleviation of adverse events associated with immunotherapy, particularly of cancer immunotherapy, more particularly of cytokine release syndrome (CRS) in a patient as defined in the preceding embodiments, particularly a patient who is at risk of developing CRS, wherein a first dose, optionally also at least one further dose, of said inhibitor is administered before administration of said antibody construct, and wherein at least one further dose of said inhibitor is administered following administration of said antibody construct, wherein the first dose of said inhibitor is administered within a first period before administration of the antibody construct, wherein optionally also said at least one further dose of said inhibitor is administered within a second period before administration of the antibody construct, wherein at least one other dose of said inhibitor is administered within a third period following administration of said antibody construct, wherein the further dose of said inhibitor is administered within a period ranging from 30 minutes to 2 days prior to administration of the antibody construct.
   (xix) The method of treating cancer with an antibody construct as defined above, particularly with a cancer immunotherapy, more particularly of FLT3+ target cells, such as leukemia and/or lymphoma, particularly myeloid leukemia, more particularly AML, according to any one of embodiments (i) to (xviii), wherein said method comprises the steps:
[0566] (a) Administering an inhibitor/antagonist of TNF-alpha/TNF-alpha-Receptor reducing TNF-alpha/TNF-alpha-Receptor signaling as defined in any of the foregoing sections,
[0567] (b) Administering an antibody construct that binds FLT3 on a target cell and CD3 on a T cell,
   wherein said method comprises the prevention, prophylaxis, amelioration, reduction and/or alleviation of adverse events associated with immunotherapy, particularly of cancer immunotherapy, more particularly of cytokine release syndrome (CRS) in a patient as defined in the preceding embodiments, particularly a patient who is at risk of developing CRS, wherein a first dose, optionally also at least one further dose, of said inhibitor is administered before administration of said antibody construct, and wherein at least one further dose of said inhibitor is administered following administration of said antibody construct, wherein the first dose of said inhibitor is administered within a first period before administration of the antibody construct, wherein optionally also said at least one further dose of said inhibitor is administered within a second period before administration of the antibody construct, wherein at least one other dose of said inhibitor is administered within a third period following administration of said antibody construct, wherein the further dose of said inhibitor is administered within a period ranging from 30 minutes to 1 day prior to administration of the antibody construct.
   (xx) The method of treating cancer with an antibody construct as defined above, particularly with a cancer immunotherapy, more particularly of FLT3+ target cells, such as leukemia and/or lymphoma, particularly myeloid leukemia, more particularly AML, according to any one of embodiments (i) to (xix), wherein said method comprises the steps:
[0568] (a) Administering an inhibitor/antagonist of TNF-alpha/TNF-alpha-Receptor reducing TNF-alpha/TNF-alpha-Receptor signaling as defined in any of the foregoing sections,
[0569] (b) Administering an antibody construct that binds FLT3 on a target cell and CD3 on a T cell,
   wherein said method comprises the prevention, prophylaxis, amelioration, reduction and/or alleviation of adverse events associated with immunotherapy, particularly of cancer immunotherapy, more particularly of cytokine release syndrome (CRS) in a patient as defined in the preceding embodiments, particularly a patient who is at risk of developing CRS, wherein a first dose, optionally also at least one further dose, of said inhibitor is administered before administration of said antibody construct, and wherein at least one further dose of said inhibitor is administered following administration of said antibody construct, wherein the first dose of said inhibitor is administered within a first period before administration of the antibody construct, wherein optionally also said at least one further dose of said inhibitor is administered within a second period before administration of the antibody construct, wherein at least one other dose of said inhibitor is administered within a third period following administration of said antibody construct, wherein the first dose and at least one further dose of said inhibitor comprise different quantities of inhibitor and/or different quantities of the antibody construct.
   (xxi) The method of treating cancer with an antibody construct as defined above, particularly with a cancer immunotherapy, more particularly of FLT3+ target cells, such as leukemia and/or lymphoma, particularly myeloid leukemia, more particularly AML, according to any one of embodiments (i) to (xx), wherein said method comprises the steps:
[0570] (a) Administering an inhibitor/antagonist of TNF-alpha/TNF-alpha-Receptor reducing TNF-alpha/TNF-alpha-Receptor signaling as defined in any of the foregoing sections,
[0571] (b) Administering an antibody construct that binds FLT3 on a target cell and CD3 on a T cell,
   wherein said method comprises the prevention, prophylaxis, amelioration, reduction and/or alleviation of adverse events associated with immunotherapy, particularly of cancer immunotherapy, more particularly of cytokine release syndrome (CRS) in a patient as defined in the preceding embodiments, particularly a patient who is at risk of developing CRS, wherein a first dose, optionally also at least one further dose, of said inhibitor is administered before administration of said antibody construct, and wherein further dose of said inhibitor is administered following administration of said antibody construct, wherein the first dose of said inhibitor is administered within a first period before administration of the antibody construct, wherein optionally also said at least one further dose of said inhibitor is administered within a second period before administration of the antibody construct, wherein at least one other dose of said inhibitor is administered within a third period following administration of said antibody construct, wherein the first dose and at least one further dose of said inhibitor comprise identical quantities of inhibitor and/or identical quantities of the antibody construct.
   (xxii) The method of treating cancer with an antibody construct as defined above, particularly with a cancer immunotherapy, more particularly of FLT3+ target cells, such as leukemia and/or lymphoma, particularly myeloid leukemia, more particularly AML, according to any one of embodiments (i) to (xxi), wherein said method comprises the steps:
[0572] (a) Administering an inhibitor/antagonist of TNF-alpha/TNF-alpha-Receptor reducing TNF-alpha/TNF-alpha-Receptor signaling as defined in any of the foregoing sections,
[0573] (b) Administering an antibody construct that binds FLT3 on a target cell and CD3 on a T cell,
   wherein said method comprises the prevention, prophylaxis, amelioration, reduction and/or alleviation of adverse events associated with immunotherapy, particularly of cancer immunotherapy, more particularly of cytokine release syndrome (CRS) in a patient as defined in the preceding embodiments, particularly a patient who is at risk of developing CRS, wherein a first dose, optionally also at least one further dose, of said inhibitor is administered before administration of said antibody construct, and wherein further dose of said inhibitor is administered following administration of said antibody construct, wherein the first dose of said inhibitor is administered within a first period before administration of the antibody construct, wherein optionally also said at least one further dose of said inhibitor is administered within a second period before administration of the antibody construct, wherein at least one other dose of said inhibitor is administered within a third period following administration of said antibody construct, wherein said other dose of said inhibitor that is administered following administration of said antibody construct is administered within a period from 1 day to 7 days following a first administration of a dose of said antibody construct.
   (xxiii) The method of treating cancer with an antibody construct as defined above, particularly with a cancer immunotherapy, more particularly of FLT3+ target cells, such as leukemia and/or lymphoma, particularly myeloid leukemia, more particularly AML, according to any one of embodiments (i) to (xxii), wherein said method comprises the steps:
[0574] (a) Administering an inhibitor/antagonist of TNF-alpha/TNF-alpha-Receptor reducing TNF-alpha/TNF-alpha-Receptor signaling as defined in any of the foregoing sections,
[0575] (b) Administering an antibody construct that binds FLT3 on a target cell and CD3 on a T cell,
   wherein said method comprises the prevention, prophylaxis, amelioration, reduction and/or alleviation of adverse events associated with immunotherapy, particularly of cancer immunotherapy, more particularly of cytokine release syndrome (CRS) in a patient as defined in the preceding embodiments, particularly a patient who is at risk of developing CRS, wherein a first dose, optionally also at least one further dose, of said inhibitor is administered before administration of said antibody construct, and wherein at least one further dose of said inhibitor is administered following administration of said antibody construct, wherein the first dose of said inhibitor is administered within a first period before administration of the antibody construct, wherein optionally also said at least one further dose of said inhibitor is administered within a second period before administration of the antibody construct, wherein at least one other dose of said inhibitor is administered within a third period following administration of said antibody construct, wherein said other dose of said inhibitor that is administered following administration of said antibody construct is administered within a period from 1 day to 6 days following a first administration of a dose of said antibody construct.
   (xxiv) The method of treating cancer with an antibody construct as defined above, particularly with a cancer immunotherapy, more particularly of FLT3+ target cells, such as leukemia and/or lymphoma, particularly myeloid leukemia, more particularly AML, according to any one of embodiments (i) to (xxiii), wherein said method comprises the steps:
[0576] (a) Administering an inhibitor/antagonist of TNF-alpha/TNF-alpha-Receptor reducing TNF-alpha/TNF-alpha-Receptor signaling as defined in any of the foregoing sections,
[0577] (b) Administering an antibody construct that binds FLT3 on a target cell and CD3 on a T cell,
   wherein said method comprises the prevention, prophylaxis, amelioration, reduction and/or alleviation of adverse events associated with immunotherapy, particularly of cancer immunotherapy, more particularly of cytokine release syndrome (CRS) in a patient as defined in the preceding embodiments, particularly a patient who is at risk of developing CRS, wherein a first dose, optionally also at least one further dose, of said inhibitor is administered before administration of said antibody construct, and wherein at least one further dose of said inhibitor is administered following administration of said antibody construct, wherein the first dose of said inhibitor is administered within a first period before administration of the antibody construct, wherein optionally also said at least one further dose of said inhibitor is administered within a second period before administration of the antibody construct, wherein at least one other dose of said inhibitor is administered within a third period following administration of said antibody construct, wherein said other dose of said inhibitor that is administered following administration of said antibody construct is administered within a period from 1 day to 5 days following a first administration of a dose of said antibody construct.
   (xxv) The method of treating cancer with an antibody construct as defined above, particularly with a cancer immunotherapy, more particularly of FLT3+ target cells, such as leukemia and/or lymphoma, particularly myeloid leukemia, more particularly AML, according to any one of embodiments (i) to (xxiv), wherein said method comprises the steps:
[0578] (a) Administering an inhibitor/antagonist of TNF-alpha/TNF-alpha-Receptor reducing TNF-alpha/TNF-alpha-Receptor signaling as defined in any of the foregoing sections,
[0579] (b) Administering an antibody construct that binds FLT3 on a target cell and CD3 on a T cell,
   wherein said method comprises the prevention, prophylaxis, amelioration, reduction and/or alleviation of adverse events associated with immunotherapy, particularly of cancer immunotherapy, more particularly of cytokine release syndrome (CRS) in a patient as defined in the preceding embodiments, particularly a patient who is at risk of developing CRS, wherein a first dose, optionally also at least one further dose, of said inhibitor is administered before administration of said antibody construct, and wherein at least one further dose of said inhibitor is administered following administration of said antibody construct, wherein the first dose of said inhibitor is administered within a first period before administration of the antibody construct, wherein optionally also said at least one further dose of said inhibitor is administered within a second period before administration of the antibody construct, wherein at least one other dose of said inhibitor is administered within a third period following administration of said antibody construct, wherein said other dose of said inhibitor that is administered following administration of said antibody construct is administered within a period from 1 day to 4 days following a first administration of a dose of said antibody construct.
   (xxvi) The method of treating cancer with an antibody construct as defined above, particularly with a cancer immunotherapy, more particularly of FLT3+ target cells, such as leukemia and/or lymphoma, particularly myeloid leukemia, more particularly AML, according to any one of embodiments (i) to (xxv), wherein said method comprises the steps:
[0580] (a) Administering an inhibitor/antagonist of TNF-alpha/TNF-alpha-Receptor reducing TNF-alpha/TNF-alpha-Receptor signaling as defined in any of the foregoing sections,
[0581] (b) Administering an antibody construct that binds FLT3 on a target cell and CD3 on a T cell,
   wherein said method comprises the prevention, prophylaxis, amelioration, reduction and/or alleviation of adverse events associated with immunotherapy, particularly of cancer immunotherapy, more particularly of cytokine release syndrome (CRS) in a patient as defined in the preceding embodiments, particularly a patient who is at risk of developing CRS, wherein a first dose, optionally also at least one further dose, of said inhibitor is administered before administration of said antibody construct, and wherein at least one further dose of said inhibitor is administered following administration of said antibody construct, wherein the first dose of said inhibitor is administered within a first period before administration of the antibody construct, wherein optionally also said at least one further dose of said inhibitor is administered within a second period before administration of the antibody construct, wherein at least one other dose of said inhibitor is administered within a third period following administration of said antibody construct, wherein said other dose of said inhibitor that is administered following administration of said antibody construct is administered within a period from 1 day to 3 days following a first administration of a dose of said antibody construct.
   (xxvii) The method of treating cancer with an antibody construct as defined above, particularly with a cancer immunotherapy, more particularly of FLT3+ target cells, such as leukemia and/or lymphoma, particularly myeloid leukemia, more particularly AML, according to any one of embodiments (i) to (xxvi), wherein said method comprises the steps:
[0582] (a) Administering an inhibitor/antagonist of TNF-alpha/TNF-alpha-Receptor reducing TNF-alpha/TNF-alpha-Receptor signaling as defined in any of the foregoing sections,
[0583] (b) Administering an antibody construct that binds FLT3 on a target cell and CD3 on a T cell,
   wherein said method comprises the prevention, prophylaxis, amelioration, reduction and/or alleviation of adverse events associated with immunotherapy, particularly of cancer immunotherapy, more particularly of cytokine release syndrome (CRS) in a patient as defined in the preceding embodiments, particularly a patient who is at risk of developing CRS, wherein a first dose, optionally also at least one further dose, of said inhibitor is administered before administration of said antibody construct, and wherein further dose of said inhibitor is administered following administration of said antibody construct, wherein the first dose of said inhibitor is administered within a first period before administration of the antibody construct, wherein optionally also said at least one further dose of said inhibitor is administered within a second period before administration of the antibody construct, wherein at least one other dose of said inhibitor is administered within a third period following administration of said antibody construct, wherein said other dose of said inhibitor that is administered following administration of said antibody construct is administered within a period from 1 day to 2 days following a first administration of a dose of said antibody construct.
   (xxviii) The method of treating cancer with an antibody construct as defined above, particularly with a cancer immunotherapy, more particularly of FLT3+ target cells, such as leukemia and/or lymphoma, particularly myeloid leukemia, more particularly AML, according to any one of embodiments (i) to (xxvii), wherein said method comprises the prevention, prophylaxis, amelioration, reduction and/or alleviation of adverse events associated with immunotherapy, particularly of cancer immunotherapy, more particularly of cytokine release syndrome (CRS) in a patient as defined in the preceding embodiments, particularly a patient who is at risk of developing CRS, wherein the domain of the antibody construct used in accordance with the present invention that which binds to FLT3 comprises a VL region, or wherein the domain comprises VL regions that bind an epitope of FLT3 that is bound by an antibody construct comprising a VL region, comprising the CDR-L-sequences selected from those depicted in: SEQ ID NOs: 344-346, SEQ ID NOs: 354-356, SEQ ID NOs: 364-366, SEQ ID NOs: 374-376, SEQ ID NOs: 384-386, SEQ ID NOs: 394-396, SEQ ID NOs: 404-406, SEQ ID NOs: 414-416, SEQ ID NOs: 424-426, SEQ ID NOs: 434-436, SEQ ID NOs: 444-446, SEQ ID NOs: 454-456, SEQ ID NOs: 464-466, SEQ ID NOs: 474-476, SEQ ID NOs: 484-486, SEQ ID NOs: 494-496, SEQ ID NOs: 504-506, SEQ ID NOs: 514-516, SEQ ID NOs: 524-526, SEQ ID NOs: 534-536, SEQ ID NOs: 544-546, SEQ ID NOs: 554-556, SEQ ID NOs: 564-566, SEQ ID NOs: 574-576, SEQ ID NOs: 584-586, SEQ ID NOs: 594-596, SEQ ID NOs: 604-606, SEQ ID NOs: 614-616, SEQ ID NOs: 624-626, SEQ ID NOs: 634-636, SEQ ID NOs: 644-646, SEQ ID NOs: 654-656, SEQ ID NOs: 664-666, SEQ ID NOs: 674-676, SEQ ID NOs: 684-686, SEQ ID NOs: 694-696, SEQ ID NOs: 704-706, SEQ ID NOs: 714-716, SEQ ID NOs: 724-726, SEQ ID NOs: 734-736, SEQ ID NOs: 744-746, SEQ ID NOs: 754-756, SEQ ID NOs: 764-766, SEQ ID NOs: 774-776, SEQ ID NOs: 784-786, SEQ ID NOs: 794-796, SEQ ID NOs: 804-806, SEQ ID NOs: 814-816, SEQ ID NOs: 824-826, SEQ ID NOs: 834-836, SEQ ID NOs: 844-846, SEQ ID NOs: 854-856, SEQ ID NOs: 864-866, SEQ ID NOs: 874-876, SEQ ID NOs: 884-886, SEQ ID NOs: 894-896, SEQ ID NOs: 904-906, SEQ ID NOs: 914-916, SEQ ID NOs: 924-926, SEQ ID NOs: 934-936, SEQ ID NOs: 944-946, SEQ ID NOs: 954-956, SEQ ID NOs: 964-966, SEQ ID NOs: 974-976, SEQ ID NOs: 984-986, particularly SEQ ID Nos: 564-566, SEQ ID Nos: 754-756, SEQ ID NOs: 724-726, and preferably SEQ ID NOs: 724-726.
   (xxix) The method of treating cancer with an antibody construct as defined above, particularly with a cancer immunotherapy, more particularly of FLT3+ target cells, such as leukemia and/or lymphoma, particularly myeloid leukemia, more particularly AML, according to any one of embodiments (i) to (xxviii), wherein said method comprises the prevention, prophylaxis, amelioration, reduction and/or alleviation of adverse events associated with immunotherapy, particularly of cancer immunotherapy, more particularly of cytokine release syndrome (CRS) in a patient as defined in the preceding embodiments, particularly a patient who is at risk of developing CRS, wherein the domain which binds to FLT3 comprises a VH region, or wherein the domain comprises VH regions that bind an epitope of FLT3 that is bound by an antibody construct comprising a CDR-H-sequences selected from those depicted in: SEQ ID NOs: 341-343; SEQ ID NOs: 351-353, SEQ ID NOs: 361-363, SEQ ID NOs: 371-373, SEQ ID NOs: 381-383, SEQ ID NOs: 391-393, SEQ ID NOs: 401-403, SEQ ID NOs: 411-413, SEQ ID NOs: 421-423, SEQ ID NOs: 431-433, SEQ ID NOs: 441-443, SEQ ID NOs: 451-453, SEQ ID NOs: 461-463, SEQ ID NOs: 471-473, SEQ ID NOs: 481-483, SEQ ID NOs: 491-493, SEQ ID NOs: 501-503, SEQ ID NOs: 511-513, SEQ ID NOs: 521-523, SEQ ID NOs: 531-533, SEQ ID NOs: 541-543, SEQ ID NOs: 551-553, SEQ ID NOs: 561-563, SEQ ID NOs: 571-573, SEQ ID NOs: 581-583, SEQ ID NOs: 591-593, SEQ ID NOs: 601-603, SEQ ID NOs: 611-613, SEQ ID NOs: 621-623, SEQ ID NOs: 631-633, SEQ ID NOs: 641-643, SEQ ID NOs: 651-653, SEQ ID NOs: 661-663, SEQ ID NOs: 671-673, SEQ ID NOs: 681-683, SEQ ID NOs: 691-693, SEQ ID NOs: 701-703, SEQ ID NOs: 711-713, SEQ ID NOs: 721-723, SEQ ID NOs: 731-733, SEQ ID NOs: 741-743, SEQ ID NOs: 751-753, SEQ ID NOs: 761-763, SEQ ID NOs: 771-773, SEQ ID NOs: 781-783, SEQ ID NOs: 791-793, SEQ ID NOs: 801-803, SEQ ID NOs: 811-813, SEQ ID NOs: 821-823, SEQ ID NOs: 831-833, SEQ ID NOs: 841-843, SEQ ID NOs: 851-853, SEQ ID NOs: 861-863, SEQ ID NOs: 871-873, SEQ ID NOs: 881-883, SEQ ID NOs: 891-896, SEQ ID NOs: 901-903, SEQ ID NOs: 911-913, SEQ ID NOs: 921-923, SEQ ID NOs: 931-933, SEQ ID NOs: 941-943, SEQ ID NOs: 951-953, SEQ ID NOs: 961-963, SEQ ID NOs: 971-973, SEQ ID NOs: 981-983, particularly SEQ ID Nos: 561-563, SEQ ID Nos: 751-753, SEQ ID NOs: 721-723, and preferably SEQ ID NOs: 721-723.
   (xxx) The method of treating cancer with an antibody construct as defined above, particularly with a cancer immunotherapy, more particularly of FLT3+ target cells, such as leukemia and/or lymphoma, particularly myeloid leukemia, more particularly AML, according to any one of embodiments (i) to (xxviii), wherein said method comprises the prevention, prophylaxis, amelioration, reduction and/or alleviation of adverse events associated with immunotherapy, particularly of cancer immunotherapy, more particularly of cytokine release syndrome (CRS) in a patient as defined in the preceding embodiments, particularly a patient who is at risk of developing CRS, wherein the domain which binds to FLT3 comprises a VL region, or binds to an epitope that is bound by a VL region comprising CDR-L1, CDR-L2 and CDR-L3 sequences and a VH region comprising CDR-H1, CDR-H2 and CDR-H3 selected from those depicted in the group comprising:

[0584] SEQ ID Nos: SEQ ID NOs: 341-346, SEQ ID NOs: 351-356, SEQ ID NOs: 361-366, SEQ ID NOs: 371-376, SEQ ID NOs: 381-386, SEQ ID NOs: 391-396, SEQ ID NOs: 401-406, SEQ ID NOs: 411-416, SEQ ID NOs: 421-426, SEQ ID NOs: 431-436, SEQ ID NOs: 441-446, SEQ ID NOs: 451-456, SEQ ID NOs: 461-466, SEQ ID NOs: 471-476, SEQ ID NOs: 481-486, SEQ ID NOs: 491-496, SEQ ID NOs: 501-506, SEQ ID NOs: 511-516, SEQ ID NOs: 521-526, SEQ ID NOs: 531-536, SEQ ID NOs: 541-546, SEQ ID NOs: 551-556, SEQ ID NOs: 561-566, SEQ ID NOs: 571-576, SEQ ID NOs: 581-586, SEQ ID NOs: 591-596, SEQ ID NOs: 601-606, SEQ ID NOs: 611-616, SEQ ID NOs: 621-626, SEQ ID NOs: 631-636, SEQ ID NOs: 641-646, SEQ ID NOs: 651-656, SEQ ID NOs: 661-666, SEQ ID NOs: 671-676, SEQ ID NOs: 681-686, SEQ ID NOs: 691-696, SEQ ID NOs: 701-706, SEQ ID NOs: 711-716, SEQ ID NOs: 721-726, SEQ ID NOs: 731-736, SEQ ID NOs: 741-746, SEQ ID NOs: 751-756, SEQ ID NOs: 761-766, SEQ ID NOs: 771-776, SEQ ID NOs: 781-786, SEQ ID NOs: 791-796, SEQ ID NOs: 801-806, SEQ ID NOs: 811-816, SEQ ID NOs: 821-826, SEQ ID NOs: 831-836, SEQ ID NOs: 841-846, SEQ ID NOs: 851-856, SEQ ID NOs: 861-866, SEQ ID NOs: 871-876, SEQ ID NOs: 881-886, SEQ ID NOs: 891-896, SEQ ID NOs: 901-906, SEQ ID NOs: 911-916, SEQ ID NOs: 921-926, SEQ ID NOs: 931-936, SEQ ID NOs: 941-946, SEQ ID NOs: 951-956, SEQ ID NOs: 961-966, SEQ ID NOs: 971-976, SEQ ID NOs: 981-986, particularly SEQ ID Nos: 561-566, SEQ ID Nos: 751-756, SEQ ID NOs: 721-726, and preferably SEQ ID NOs: 721-726.

(xxxi) The method of treating cancer with an antibody construct as defined above, particularly with a cancer immunotherapy, more particularly of FLT3+ target cells, such as leukemia and/or lymphoma, particularly myeloid leukemia, more particularly AML, according to any one of embodiments (i) to (xxx), wherein the domain which binds to FLT3 comprises a VL region, or wherein the domain binds to an epitope that is bound by a VL region, selected from the group of VL regions as depicted in any one of SEQ ID NO: 348, SEQ ID NO: 358, SEQ ID NO: 368, SEQ ID NO: 378, SEQ ID NO: 388, SEQ ID NO: 398, SEQ ID NO: 407+408, SEQ ID NO: 418, SEQ ID NO: 428, SEQ ID NO: 438, SEQ ID NO: 448, SEQ ID NO: 458, SEQ ID NO: 468, SEQ ID NO: 478, SEQ ID NO: 488, SEQ ID NO: 498, SEQ ID NO: 508, SEQ ID NO: 518, SEQ ID NO: 528, SEQ ID NO: 538, SEQ ID NO: 548, SEQ ID NO: 558, SEQ ID NO: 568, SEQ ID NO: 578, SEQ ID NO: 588, SEQ ID NO: 598, SEQ ID NO: 608, SEQ ID NO: 618, SEQ ID NO: 628, SEQ ID NO: 638, SEQ ID NO: 648, SEQ ID NO: 658, SEQ ID NO: 668, SEQ ID NO: 678, SEQ ID NO: 688, SEQ ID NO: 698, SEQ ID NO: 708, SEQ ID NO: 718, SEQ ID NO: 728, SEQ ID NO: 738, SEQ ID NO: 748, SEQ ID NO: 758, SEQ ID NO: 768, SEQ ID NO: 778, SEQ ID NO: 788, SEQ ID NO: 798, SEQ ID NO: 808, SEQ ID NO: 818, SEQ ID NO: 828, SEQ ID NO: 838, SEQ ID NO: 848, SEQ ID NO: 858, SEQ ID NO: 868, SEQ ID NO: 878, SEQ ID NO: 888, SEQ ID NO: 898, SEQ ID NO: 908, SEQ ID NO: 918, SEQ ID NO: 928, SEQ ID NO: 938, SEQ ID NO: 948, SEQ ID NO: 958, SEQ ID NO: 968, SEQ ID NO: 978 particularly SEQ ID Nos: 728, 568, 758, preferably SEQ ID NO: 728.
(xxxii) The method of treating cancer with an antibody construct as defined above, particularly with a cancer immunotherapy, more particularly of FLT3+ target cells, such as leukemia and/or lymphoma, particularly myeloid leukemia, more particularly AML, according to any one of embodiments (i) to (xxxi), wherein the domain which binds to FLT3 comprises a VH region, or wherein the domain binds to an epitope that is bound by a VH region, selected from the group consisting of VH regions as depicted in any one of SEQ ID NO: 347, SEQ ID NO: 357, SEQ ID NO: 367, SEQ ID NO: 377, SEQ ID NO: 387, SEQ ID NO: 397, SEQ ID NO: 407, SEQ ID NO: 417, SEQ ID NO: 427, SEQ ID NO: 437, SEQ ID NO: 447, SEQ ID NO: 457, SEQ ID NO: 467, SEQ ID NO: 477, SEQ ID NO: 487, SEQ ID NO: 497, SEQ ID NO: 507, SEQ ID NO: 517, SEQ ID NO: 527, SEQ ID NO: 537, SEQ ID NO: 547, SEQ ID NO: 557, SEQ ID NO: 567, SEQ ID NO: 577, SEQ ID NO: 587, SEQ ID NO: 597, SEQ ID NO: 607, SEQ ID NO: 617, SEQ ID NO: 627, SEQ ID NO: 637, SEQ ID NO: 647, SEQ ID NO: 657, SEQ ID NO: 667, SEQ ID NO: 677, SEQ ID NO: 687, SEQ ID NO: 697, SEQ ID NO: 707, SEQ ID NO: 717, SEQ ID NO: 727, SEQ ID NO: 737, SEQ ID NO: 747, SEQ ID NO: 757, SEQ ID NO: 767, SEQ ID NO: 777, SEQ ID NO: 787, SEQ ID NO: 797, SEQ ID NO: 807, SEQ ID NO: 817, SEQ ID NO: 827, SEQ ID NO: 837, SEQ ID NO: 847, SEQ ID NO: 857, SEQ ID NO: 867, SEQ ID NO: 877, SEQ ID NO: 887, SEQ ID NO: 897, SEQ ID NO: 907, SEQ ID NO: 917, SEQ ID NO: 927, SEQ ID NO: 937, SEQ ID NO: 947, SEQ ID NO: 957, SEQ ID NO: 967, SEQ ID NO: 977, particularly SEQ ID Nos: 727, 767, 757, preferably SEQ ID NO: 727.
(xxxiii) The method of treating cancer with an antibody construct as defined above, particularly with a cancer immunotherapy, more particularly of FLT3+ target cells, such as leukemia and/or lymphoma, particularly myeloid leukemia, more particularly AML, according to any one of embodiments (i) to (xxxii), wherein the domain which binds to FLT3 comprises a VL region and a VH region, wherein the VL region is selected from the group of sequences depicted in any one of SEQ ID NO: 348, SEQ ID NO: 358, SEQ ID NO: 368, SEQ ID NO: 378, SEQ ID NO: 388, SEQ ID NO: 398, SEQ ID NO: 407+408, SEQ ID NO: 418, SEQ ID NO: 428, SEQ ID NO: 438, SEQ ID NO: 448, SEQ ID NO: 458, SEQ ID NO: 468, SEQ ID NO: 478, SEQ ID NO: 488, SEQ ID NO: 498, SEQ ID NO: 508, SEQ ID NO: 518, SEQ ID NO: 528, SEQ ID NO: 538, SEQ ID NO: 548, SEQ ID NO: 558, SEQ ID NO: 568, SEQ ID NO: 578, SEQ ID NO: 588, SEQ ID NO: 598, SEQ ID NO: 608, SEQ ID NO: 618, SEQ ID NO: 628, SEQ ID NO: 638, SEQ ID NO: 648, SEQ ID NO: 658, SEQ ID NO: 668, SEQ ID NO: 678, SEQ ID NO: 688, SEQ ID NO: 698, SEQ ID NO: 708, SEQ ID NO: 718, SEQ ID NO: 728, SEQ ID NO: 738, SEQ ID NO: 748, SEQ ID NO: 758, SEQ ID NO: 768, SEQ ID NO: 778, SEQ ID NO: 788, SEQ ID NO: 798, SEQ ID NO: 808, SEQ ID NO: 818, SEQ ID NO: 828, SEQ ID NO: 838, SEQ ID NO: 848, SEQ ID NO: 858, SEQ ID NO: 868, SEQ ID NO: 878, SEQ ID NO: 888, SEQ ID NO: 898, SEQ ID NO: 908, SEQ ID NO: 918, SEQ ID NO: 928, SEQ ID NO: 938, SEQ ID NO: 948, SEQ ID NO: 958, SEQ ID NO: 968, SEQ ID NO: 978, particularly SEQ ID Nos: 728, 568, 758, preferably SEQ ID NO: 728, and wherein the VH region is selected from the group of sequences depicted in any one of SEQ ID NO: 347, SEQ ID NO: 357, SEQ ID NO: 367, SEQ ID NO: 377, SEQ ID NO: 387, SEQ ID NO: 397, SEQ ID NO: 407, SEQ ID NO: 417, SEQ ID NO: 427, SEQ ID NO: 437, SEQ ID NO: 447, SEQ ID NO: 457, SEQ ID NO: 467, SEQ ID NO: 477, SEQ ID NO: 487, SEQ ID NO: 497, SEQ ID NO: 507, SEQ ID NO: 517, SEQ ID NO: 527, SEQ ID NO: 537, SEQ ID NO: 547, SEQ ID NO: 557, SEQ ID NO: 567, SEQ ID NO: 577, SEQ ID NO: 587, SEQ ID NO: 597, SEQ ID NO: 607, SEQ ID NO: 617, SEQ ID NO: 627, SEQ ID NO: 637, SEQ ID NO: 647, SEQ ID NO: 657, SEQ ID NO: 667, SEQ ID NO: 677, SEQ ID NO: 687, SEQ ID NO: 697, SEQ ID NO: 707, SEQ ID NO: 717, SEQ ID NO: 727, SEQ ID NO: 737, SEQ ID NO: 747, SEQ ID NO: 757, SEQ ID NO: 767, SEQ ID NO: 777, SEQ ID NO: 787, SEQ ID NO: 797, SEQ ID NO: 807, SEQ ID NO: 817, SEQ ID NO: 827, SEQ ID NO: 837, SEQ ID NO: 847, SEQ ID NO: 857, SEQ ID NO: 867, SEQ ID NO: 877, SEQ ID NO: 887, SEQ ID NO: 897, SEQ ID NO: 907, SEQ ID NO: 917, SEQ ID NO: 927, SEQ ID NO: 937, SEQ ID NO: 947, SEQ ID NO: 957, SEQ ID NO: 967, SEQ ID NO: 977, particularly SEQ ID Nos: 727, 767, 757, preferably SEQ ID NO: 727, or wherein the VL region and the VH region bind to an epitope that is recognized by any of the above depicted VL and VH regions or compete with an antibody construct the comprises such regions.

[0585] The method of treating cancer with an antibody construct as defined above, particularly with a cancer immunotherapy, more particularly of FLT3+ target cells, such as leukemia and/or lymphoma, particularly myeloid leukemia, more particularly AML, according to any one of embodiments (i) to (xxxiii), wherein the domain which binds to FLT3 comprises a VL region and a VH, wherein the VL region is selected from the group of sequences depicted in any one of SEQ ID NO: 348, SEQ ID NO: 358, SEQ ID NO: 368, SEQ ID NO: 378, SEQ ID NO: 388, SEQ ID NO: 398, SEQ ID NO: 407+408, SEQ ID NO: 418, SEQ ID NO: 428, SEQ ID NO: 438, SEQ ID NO: 448, SEQ ID NO: 458, SEQ ID NO: 468, SEQ ID NO: 478, SEQ ID NO: 488, SEQ ID NO: 498, SEQ ID NO: 508, SEQ ID NO: 518, SEQ ID NO: 528, SEQ ID NO: 538, SEQ ID NO: 548, SEQ ID NO: 558, SEQ ID NO: 568, SEQ ID NO: 578, SEQ ID NO: 588, SEQ ID NO: 598, SEQ ID NO: 608, SEQ ID NO: 618, SEQ ID NO: 628, SEQ ID NO: 638, SEQ ID NO: 648, SEQ ID NO: 658, SEQ ID NO: 668, SEQ ID NO: 678, SEQ ID NO: 688, SEQ ID NO: 698, SEQ ID NO: 708, SEQ ID NO: 718, SEQ ID NO: 728, SEQ ID NO: 738, SEQ ID NO: 748, SEQ ID NO: 758, SEQ ID NO: 768, SEQ ID NO: 778, SEQ ID NO: 788, SEQ ID NO: 798, SEQ ID NO: 808, SEQ ID NO: 818, SEQ ID NO: 828, SEQ ID NO: 838, SEQ ID NO: 848, SEQ ID NO: 858, SEQ ID NO: 868, SEQ ID NO: 878, SEQ ID NO: 888, SEQ ID NO: 898, SEQ ID NO: 908, SEQ ID NO: 918, SEQ ID NO: 928, SEQ ID NO: 938, SEQ ID NO: 948, SEQ ID NO: 958, SEQ ID NO: 968, SEQ ID NO: 978, particularly SEQ ID Nos: 728, 568, 758, preferably SEQ ID NO: 728, wherein the VH region is selected from the group of sequences depicted in any one of SEQ ID NO: 347, SEQ ID NO: 357, SEQ ID NO: 367, SEQ ID NO: 377, SEQ ID NO: 387, SEQ ID NO: 397, SEQ ID NO: 407, SEQ ID NO: 417, SEQ ID NO: 427, SEQ ID NO: 437, SEQ ID NO: 447, SEQ ID NO: 457, SEQ ID NO: 467, SEQ ID NO: 477, SEQ ID NO: 487, SEQ ID NO: 497, SEQ ID NO: 507, SEQ ID NO: 517, SEQ ID NO: 527, SEQ ID NO: 537, SEQ ID NO: 547, SEQ ID NO: 557, SEQ ID NO: 567, SEQ ID NO: 577, SEQ ID NO: 587, SEQ ID NO: 597, SEQ ID NO: 607, SEQ ID NO: 617, SEQ ID NO: 627, SEQ ID NO: 637, SEQ ID NO: 647, SEQ ID NO: 657, SEQ ID NO: 667, SEQ ID NO: 677, SEQ ID NO: 687, SEQ ID NO: 697, SEQ ID NO: 707, SEQ ID NO: 717, SEQ ID NO: 727, SEQ ID NO: 737, SEQ ID NO: 747, SEQ ID NO: 757, SEQ ID NO: 767, SEQ ID NO: 777, SEQ ID NO: 787, SEQ ID NO: 797, SEQ ID NO: 807, SEQ ID NO: 817, SEQ ID NO: 827, SEQ ID NO: 837, SEQ ID NO: 847, SEQ ID NO: 857, SEQ ID NO: 867, SEQ ID NO: 877, SEQ ID NO: 887, SEQ ID NO: 897, SEQ ID NO: 907, SEQ ID NO: 917, SEQ ID NO: 927, SEQ ID NO: 937, SEQ ID NO: 947, SEQ ID NO: 957, SEQ ID NO: 967, SEQ ID NO: 977, particularly SEQ ID Nos: 727, 767, 757, preferably SEQ ID NO: 727, or wherein the antibody construct has a domain which binds to FLT3 that comprises a VL region comprising CDR-L1, CDR-L2 and CDR-L3 selected from those depicted in: SEQ ID NOs: 344-346, SEQ ID NOs: 354-356, SEQ ID NOs: 364-366, SEQ ID NOs: 374-376, SEQ ID NOs: 384-386, SEQ ID NOs: 394-396, SEQ ID NOs: 404-406, SEQ ID NOs: 414-416, SEQ ID NOs: 424-426, SEQ ID NOs: 434-436, SEQ ID NOs: 444-446, SEQ ID NOs: 454-456, SEQ ID NOs: 464-466, SEQ ID NOs: 474-476, SEQ ID NOs: 484-486, SEQ ID NOs: 494-496, SEQ ID NOs: 504-506, SEQ ID NOs: 514-516, SEQ ID NOs: 524-526, SEQ ID NOs: 534-536, SEQ ID NOs: 544-546, SEQ ID NOs: 554-556, SEQ ID NOs: 564-566, SEQ ID NOs: 574-576, SEQ ID NOs: 584-586, SEQ ID NOs: 594-596, SEQ ID NOs: 604-606, SEQ ID NOs: 614-616, SEQ ID NOs: 624-626, SEQ ID NOs: 634-636, SEQ ID NOs: 644-646, SEQ ID NOs: 654-656, SEQ ID NOs: 664-666, SEQ ID NOs: 674-676, SEQ ID NOs: 684-686, SEQ ID NOs: 694-696, SEQ ID NOs: 704-706, SEQ ID NOs: 714-716, SEQ ID NOs: 724-726, SEQ ID NOs: 734-736, SEQ ID NOs: 744-746, SEQ ID NOs: 754-756, SEQ ID NOs: 764-766, SEQ ID NOs: 774-776, SEQ ID NOs: 784-786, SEQ ID NOs: 794-796, SEQ ID NOs: 804-806, SEQ ID NOs: 814-816, SEQ ID NOs: 824-826, SEQ ID NOs: 834-836, SEQ ID NOs: 844-846, SEQ ID NOs: 854-856, SEQ ID NOs: 864-866, SEQ ID NOs: 874-876, SEQ ID NOs: 884-886, SEQ ID NOs: 894-896, SEQ ID NOs: 904-906, SEQ ID NOs: 914-916, SEQ ID NOs: 924-926, SEQ ID NOs: 934-936, SEQ ID NOs: 944-946, SEQ ID NOs: 954-956, SEQ ID NOs: 964-966, SEQ ID NOs: 974-976, SEQ ID NOs: 984-986, particularly SEQ ID Nos: 564-566, SEQ ID Nos: 754-756, SEQ ID NOs: 724-726, and preferably SEQ ID NOs: 724-726, and wherein the antibody construct has a domain which binds to FLT3 that comprises a VH region comprising CDR-H1, CDR-H2 and CDR-H3 selected from those depicted in: SEQ ID NOs: 341-343; SEQ ID NOs: 351-353, SEQ ID NOs: 361-363, SEQ ID NOs: 371-373, SEQ ID NOs: 381-383, SEQ ID NOs: 391-393, SEQ ID NOs: 401-403, SEQ ID NOs: 411-413, SEQ ID NOs: 421-423, SEQ ID NOs: 431-433, SEQ ID NOs: 441-443, SEQ ID NOs: 451-453, SEQ ID NOs: 461-463, SEQ ID NOs: 471-473, SEQ ID NOs: 481-483, SEQ ID NOs: 491-493, SEQ ID NOs: 501-503, SEQ ID NOs: 511-513, SEQ ID NOs: 521-523, SEQ ID NOs: 531-533, SEQ ID NOs: 541-543, SEQ ID NOs: 551-553, SEQ ID NOs: 561-563, SEQ ID NOs: 571-573, SEQ ID NOs: 581-583, SEQ ID NOs: 591-593, SEQ ID NOs: 601-603, SEQ ID NOs: 611-613, SEQ ID NOs: 621-623, SEQ ID NOs: 631-633, SEQ ID NOs: 641-643, SEQ ID NOs: 651-653, SEQ ID NOs: 661-663, SEQ ID NOs: 671-673, SEQ ID NOs: 681-683, SEQ ID NOs: 691-693, SEQ ID NOs: 701-703, SEQ ID NOs: 711-713, SEQ ID NOs: 721-723, SEQ ID NOs: 731-733, SEQ ID NOs: 741-743, SEQ ID NOs: 751-753, SEQ ID NOs: 761-763, SEQ ID NOs: 771-773, SEQ ID NOs: 781-783, SEQ ID NOs: 791-793, SEQ ID NOs: 801-803, SEQ ID NOs: 811-813, SEQ ID NOs: 821-823, SEQ ID NOs: 831-833, SEQ ID NOs: 841-843, SEQ ID NOs: 851-853, SEQ ID NOs: 861-863, SEQ ID NOs: 871-873, SEQ ID NOs: 881-883, SEQ ID NOs: 891-896, SEQ ID NOs: 901-903, SEQ ID NOs: 911-913, SEQ ID NOs: 921-923, SEQ ID NOs: 931-933, SEQ ID NOs: 941-943, SEQ ID NOs: 951-953, SEQ ID NOs: 961-963, SEQ ID NOs: 971-973, SEQ ID NOs: 981-983, particularly SEQ ID Nos: 561-563, SEQ ID Nos: 751-753, SEQ ID NOs: 721-723, and preferably SEQ ID NOs: 721-723; or wherein the VL region and the VH region bind to an epitope that is selectively bound by any of the above depicted sequences.

(xxxiv) The method of treating cancer with an antibody construct as defined above, particularly with a cancer immunotherapy, more particularly of FLT3+ target cells, such as leukemia and/or lymphoma, particularly myeloid leukemia, more particularly AML, according to any one of embodiments (i) to (xxxiv), wherein a domain which binds to FLT3 competes for binding to an epitope of FLT3 with an antibody construct that binds to FLT3, wherein said competing antibody construct that binds to FLT3 may have VL and/or VH regions that differ in their amino acid sequence(s) from the said antibody constructs as defined in the preceding embodiments, when both, the competing antibody constructs and the antibody constructs as defined in the preceding embodiments are co-incubated in a competition assay with target cells that express FLT3, wherein both, competition antibody construct and antibody constructs as defined in the preceding embodiments are used at equimolar concentrations in such competition assays, wherein the competition antibody construct may be labelled, and the antibody constructs as defined in the preceding embodiments may be unlabeled or differently labelled to permit a quantification to be able to distinguish the number of competition antibody construct bound to the target antigen at the end of the competition assay method, and/or wherein the amount/number of competition antibody construct that binds under such circumstances to the target is at least 50%, at least 60%, at least 70%, at least 80%, at least 90%, preferably at least 95% of all antibody constructs selectively binding to the target antigen, and/or wherein the competition antibody construct may comprise one or more, e.g. at least 2, 3, 4, 5, 6, 7, 8, 9, 10, 11, 12, 13, 14, 15, 16, 17, 18, 19, 20 or even more amino acid residues that are different from the antibody constructs as defined in the preceding embodiments.
(xxxv) The method of treating cancer with an antibody construct as defined above, particularly with a cancer immunotherapy, more particularly of FLT3+ target cells, such as leukemia and/or lymphoma, particularly myeloid leukemia, more particularly AML, according to any one of embodiments (i) to (xxxv), wherein the competition antibody constructs have at least 1, 2, 3, 4, 5, 6, 7, 8, 9, 10, or more amino acid residues that are different from the herein described antibody constructs that are characterized by a domain which binds to FLT3 comprising a VL region and a VH region comprising CDR-LL CDR-L2 and CDR-L3 sequences and a VH region comprising CDR-H1, CDR-H2 and CDR-H3 sequences selected from: SEQ ID NOs: 341-343; SEQ ID NOs: 351-353, SEQ ID NOs: 361-363, SEQ ID NOs: 371-373, SEQ ID NOs: 381-383, SEQ ID NOs: 391-393, SEQ ID NOs: 401-403, SEQ ID NOs: 411-413, SEQ ID NOs: 421-423, SEQ ID NOs: 431-433, SEQ ID NOs: 441-443, SEQ ID NOs: 451-453, SEQ ID NOs: 461-463, SEQ ID NOs: 471-473, SEQ ID NOs: 481-483, SEQ ID NOs: 491-493, SEQ ID NOs: 501-503, SEQ ID NOs: 511-513, SEQ ID NOs: 521-523, SEQ ID NOs: 531-533, SEQ ID NOs: 541-543, SEQ ID NOs: 551-553, SEQ ID NOs: 561-563, SEQ ID NOs: 571-573, SEQ ID NOs: 581-583, SEQ ID NOs: 591-593, SEQ ID NOs: 601-603, SEQ ID NOs: 611-613, SEQ ID NOs: 621-623, SEQ ID NOs: 631-633, SEQ ID NOs: 641-643, SEQ ID NOs: 651-653, SEQ ID NOs: 661-663, SEQ ID NOs: 671-673, SEQ ID NOs: 681-683, SEQ ID NOs: 691-693, SEQ ID NOs: 701-703, SEQ ID NOs: 711-713, SEQ ID NOs: 721-723, SEQ ID NOs: 731-733, SEQ ID NOs: 741-743, SEQ ID NOs: 751-753, SEQ ID NOs: 761-763, SEQ ID NOs: 771-773, SEQ ID NOs: 781-783, SEQ ID NOs: 791-793, SEQ ID NOs: 801-803, SEQ ID NOs: 811-813, SEQ ID NOs: 821-823, SEQ ID NOs: 831-833, SEQ ID NOs: 841-843, SEQ ID NOs: 851-853, SEQ ID NOs: 861-863, SEQ ID NOs: 871-873, SEQ ID NOs: 881-883, SEQ ID NOs: 891-896, SEQ ID NOs: 901-903, SEQ ID NOs: 911-913, SEQ ID NOs: 921-923, SEQ ID NOs: 931-933, SEQ ID NOs: 941-943, SEQ ID NOs: 951-953, SEQ ID NOs: 961-963, SEQ ID NOs: 971-973, SEQ ID NOs: 981-983, particularly SEQ ID Nos: 561-563, SEQ ID Nos: 751-753, SEQ ID NOs: 721-723, and preferably SEQ ID NOs: 721-723, and SEQ ID NOs: 344-346, SEQ ID NOs: 354-356, SEQ ID NOs: 364-366, SEQ ID NOs: 374-376, SEQ ID NOs: 384-386, SEQ ID NOs: 394-396, SEQ ID NOs: 404-406, SEQ ID NOs: 414-416, SEQ ID NOs: 424-426, SEQ ID NOs: 434-436, SEQ ID NOs: 444-446, SEQ ID NOs: 454-456, SEQ ID NOs: 464-466, SEQ ID NOs: 474-476, SEQ ID NOs: 484-486, SEQ ID NOs: 494-496, SEQ ID NOs: 504-506, SEQ ID NOs: 514-516, SEQ ID NOs: 524-526, SEQ ID NOs: 534-536, SEQ ID NOs: 544-546, SEQ ID NOs: 554-556, SEQ ID NOs: 564-566, SEQ ID NOs: 574-576, SEQ ID NOs: 584-586, SEQ ID NOs: 594-596, SEQ ID NOs: 604-606, SEQ ID NOs: 614-616, SEQ ID NOs: 624-626, SEQ ID NOs: 634-636, SEQ ID NOs: 644-646, SEQ ID NOs: 654-656, SEQ ID NOs: 664-666, SEQ ID NOs: 674-676, SEQ ID NOs: 684-686, SEQ ID NOs: 694-696, SEQ ID NOs: 704-706, SEQ ID NOs: 714-716, SEQ ID NOs: 724-726, SEQ ID NOs: 734-736, SEQ ID NOs: 744-746, SEQ ID NOs: 754-756, SEQ ID NOs: 764-766, SEQ ID NOs: 774-776, SEQ ID NOs: 784-786, SEQ ID NOs: 794-796, SEQ ID NOs: 804-806, SEQ ID NOs: 814-816, SEQ ID NOs: 824-826, SEQ ID NOs: 834-836, SEQ ID NOs: 844-846, SEQ ID NOs: 854-856, SEQ ID NOs: 864-866, SEQ ID NOs: 874-876, SEQ ID NOs: 884-886, SEQ ID NOs: 894-896, SEQ ID NOs: 904-906, SEQ ID NOs: 914-916, SEQ ID NOs: 924-926, SEQ ID NOs: 934-936, SEQ ID NOs: 944-946, SEQ ID NOs: 954-956, SEQ ID NOs: 964-966, SEQ ID NOs: 974-976, SEQ ID NOs: 984-986, particularly SEQ ID Nos: 564-566, SEQ ID Nos: 754-756, SEQ ID NOs: 724-726, and preferably SEQ ID NOs: 724-726, or wherein the domain which binds to FLT3 binds to an epitope that is selectively bound by any of the above depicted sequences.
(xxxvi) The method of treating cancer with an antibody construct as defined above, particularly with a cancer immunotherapy, more particularly of FLT3+ target cells according to any one of embodiments (i) to (xxxvi), further comprising the prevention, prophylaxis, or reduction of adverse events associated with immunotherapy, particularly cancer immunotherapy, more particularly a blood cell-related cancer, such as leukemia and/or lymphoma, particularly myeloid leukemia, more particularly AML, wherein an antibody construct is administered that comprises at least one domain, which binds to FLT3 on the surface of a target cell, and at least one other domain, which binds to CD3, preferably human CD3, on the surface of a T cell, according to any one of embodiments (i) to (xiv) of general Aspect A) and as defined in Sub-Aspect B-3, wherein the first binding domain competes for binding with an antibody selected from the group consisting of FL-1 to FL-65 as disclosed in WO2017021362, i.e., an antibody comprising a VH region comprising CDR-H1, CDR-H2 and CDR-H3 and a VL region comprising CDR-L1, CDR-L2 and CDR-L3 selected from the group consisting of those described above.
(xxxvii) The method of treating cancer with an antibody construct as defined above, particularly with a cancer immunotherapy, more particularly of FLT3+ target cells according to any one of embodiments (i) to (xxxvii), further comprising the prevention, prophylaxis, or reduction of adverse events associated with immunotherapy, particularly cancer immunotherapy, more particularly a blood cell-related cancer, such as leukemia and/or lymphoma, particularly myeloid leukemia, more particularly AML, wherein an antibody construct is administered that comprises at least one domain which binds to FLT3 on the surface of a target cell, and at least one other domain which binds to CD3, preferably human CD3, on the surface of a T cell, according to any one of embodiments (i) to (xiv) of general Aspect A) and as further defined in Sub-Aspect B-3, wherein said antibody construct binds to an epitope that is selectively bound by an antibody/antibody construct that has the VH chain and/or VL chain respectively, that are disclosed in WO2017021362, particularly in the sequence listing, which is hereby incorporated by reference.
(xxxviii) Further, the present invention relates to the method of treating cancer with an antibody construct as defined above, particularly with a cancer immunotherapy, more particularly of FLT3+ target cells according to any one of embodiments (i) to (xxxviii), further comprising the prevention, prophylaxis, or reduction of adverse events associated with immunotherapy, particularly cancer immunotherapy, more particularly a blood cell-related cancer, such as leukemia and/or lymphoma, particularly myeloid leukemia, more particularly AML, wherein an antibody construct is administered that comprises at least one domain which binds to FLT3 on the surface of a target cell, and at least one other domain which binds to CD3, preferably human CD3, on the surface of a T cell, according to any one of embodiments (i) to (xiv) of general Aspect A) and as further defined in Sub-Aspect B-3, wherein the domain which binds to FLT3 comprises a VL region comprising CDR-L1, CDR-L2 and CDR-L3 sequences selected from the group comprising: SEQ ID NOs: 344-346, SEQ ID NOs: 354-356, SEQ ID NOs: 364-366, SEQ ID NOs: 374-376, SEQ ID NOs: 384-386, SEQ ID NOs: 394-396, SEQ ID NOs: 404-406, SEQ ID NOs: 414-416, SEQ ID NOs: 424-426, SEQ ID NOs: 434-436, SEQ ID NOs: 444-446, SEQ ID NOs: 454-456, SEQ ID NOs: 464-466, SEQ ID NOs: 474-476, SEQ ID NOs: 484-486, SEQ ID NOs: 494-496, SEQ ID NOs: 504-506, SEQ ID NOs: 514-516, SEQ ID NOs: 524-526, SEQ ID NOs: 534-536, SEQ ID NOs: 544-546, SEQ ID NOs: 554-556, SEQ ID NOs: 564-566, SEQ ID NOs: 574-576, SEQ ID NOs: 584-586, SEQ ID NOs: 594-596, SEQ ID NOs: 604-606, SEQ ID NOs: 614-616, SEQ ID NOs: 624-626, SEQ ID NOs: 634-636, SEQ ID NOs: 644-646, SEQ ID NOs: 654-656, SEQ ID NOs: 664-666, SEQ ID NOs: 674-676, SEQ ID NOs: 684-686, SEQ ID NOs: 694-696, SEQ ID NOs: 704-706, SEQ ID NOs: 714-716, SEQ ID NOs: 724-726, SEQ ID NOs: 734-736, SEQ ID NOs: 744-746, SEQ ID NOs: 754-756, SEQ ID NOs: 764-766, SEQ ID NOs: 774-776, SEQ ID NOs: 784-786, SEQ ID NOs: 794-796, SEQ ID NOs: 804-806, SEQ ID NOs: 814-816, SEQ ID NOs: 824-826, SEQ ID NOs: 834-836, SEQ ID NOs: 844-846, SEQ ID NOs: 854-856, SEQ ID NOs: 864-866, SEQ ID NOs: 874-876, SEQ ID NOs: 884-886, SEQ ID NOs: 894-896, SEQ ID NOs: 904-906, SEQ ID NOs: 914-916, SEQ ID NOs: 924-926, SEQ ID NOs: 934-936, SEQ ID NOs: 944-946, SEQ ID NOs: 954-956, SEQ ID NOs: 964-966, SEQ ID NOs: 974-976, SEQ ID NOs: 984-986, particularly SEQ ID Nos: 564-566, SEQ ID Nos: 754-756, SEQ ID NOs: 724-726, and preferably SEQ ID NOs: 724-726.
(xxxix) Further, the present invention relates to a method of treating cancer with an antibody construct as defined above, particularly with a cancer immunotherapy, more particularly of FLT3+ target cells according to any one of embodiments (i) to (xxxix), further comprising the prevention, prophylaxis, or reduction of adverse events associated with immunotherapy, particularly cancer immunotherapy, more particularly a blood cell-related cancer, such as such as leukemia and/or lymphoma, particularly myeloid leukemia, more particularly AML, wherein an antibody construct is administered that comprises at least one domain which binds to FLT3 on the surface of a target cell, and at least one other domain which binds to CD3, preferably human CD3, on the surface of a T cell, according to any one of embodiments (i) to (xiv) of general Aspect A) and as further defined in Sub-Aspect B-3, wherein the domain which binds to FLT3 comprises a VH region comprising CDR-H1, CDR-H2 and CDR-H3 selected from: SEQ ID NOs: 341-343; SEQ ID NOs: 351-353, SEQ ID NOs: 361-363, SEQ ID NOs: 371-373, SEQ ID NOs: 381-383, SEQ ID NOs: 391-393, SEQ ID NOs: 401-403, SEQ ID NOs: 411-413, SEQ ID NOs: 421-423, SEQ ID NOs: 431-433, SEQ ID NOs: 441-443, SEQ ID NOs: 451-453, SEQ ID NOs: 461-463, SEQ ID NOs: 471-473, SEQ ID NOs: 481-483, SEQ ID NOs: 491-493, SEQ ID NOs: 501-503, SEQ ID NOs: 511-513, SEQ ID NOs: 521-523, SEQ ID NOs: 531-533, SEQ ID NOs: 541-543, SEQ ID NOs: 551-553, SEQ ID NOs: 561-563, SEQ ID NOs: 571-573, SEQ ID NOs: 581-583, SEQ ID NOs: 591-593, SEQ ID NOs: 601-603, SEQ ID NOs: 611-613, SEQ ID NOs: 621-623, SEQ ID NOs: 631-633, SEQ ID NOs: 641-643, SEQ ID NOs: 651-653, SEQ ID NOs: 661-663, SEQ ID NOs: 671-673, SEQ ID NOs: 681-683, SEQ ID NOs: 691-693, SEQ ID NOs: 701-703, SEQ ID NOs: 711-713, SEQ ID NOs: 721-723, SEQ ID NOs: 731-733, SEQ ID NOs: 741-743, SEQ ID NOs: 751-753, SEQ ID NOs: 761-763, SEQ ID NOs: 771-773, SEQ ID NOs: 781-783, SEQ ID NOs: 791-793, SEQ ID NOs: 801-803, SEQ ID NOs: 811-813, SEQ ID NOs: 821-823, SEQ ID NOs: 831-833, SEQ ID NOs: 841-843, SEQ ID NOs: 851-853, SEQ ID NOs: 861-863, SEQ ID NOs: 871-873, SEQ ID NOs: 881-883, SEQ ID NOs: 891-896, SEQ ID NOs: 901-903, SEQ ID NOs: 911-913, SEQ ID NOs: 921-923, SEQ ID NOs: 931-933, SEQ ID NOs: 941-943, SEQ ID NOs: 951-953, SEQ ID NOs: 961-963, SEQ ID NOs: 971-973, SEQ ID NOs: 981-983, particularly SEQ ID Nos: 561-563, SEQ ID Nos: 751-753, SEQ ID NOs: 721-723, and preferably SEQ ID NOs: 721-723.
(xl) Further, the present invention relates to a method of treating cancer with an antibody construct as defined above, particularly with a cancer immunotherapy, more particularly of FLT3+ target cells according to any one of embodiments (i) to (xl), further comprising the prevention, prophylaxis, or reduction of adverse events associated with immunotherapy, particularly cancer immunotherapy, more particularly a blood cell-related cancer such as leukemia and/or lymphoma, particularly myeloid leukemia, more particularly AML, wherein an antibody construct is administered that comprises at least one domain which binds to FLT3 on the surface of a target cell, and at least one other domain which binds to CD3, preferably human CD3, on the surface of a T cell, according to any one of embodiments (i) to (xiv) of general Aspect A) and as further defined Sub-Aspect B-3, wherein the domain which binds to FLT3 comprises pairs of a VH region and a VL region as depicted in SEQ ID NO: 347+348, SEQ ID NO: 357+358, SEQ ID NO: 367+368, SEQ ID NO: 377+378, SEQ ID NO: 387+388, SEQ ID NO: 397+398, SEQ ID NO: 407+408, SEQ ID NO: 417+418, SEQ ID NO: 427+428, SEQ ID NO: 437+438, SEQ ID NO: 447+448, SEQ ID NO: 457+458, SEQ ID NO: 467+468, SEQ ID NO: 477+478, SEQ ID NO: 487+488, SEQ ID NO: 497+498, SEQ ID NO: 507+508, SEQ ID NO: 517+518, SEQ ID NO: 527+528, SEQ ID NO: 537+538, SEQ ID NO: 547+548, SEQ ID NO: 557+558, SEQ ID NO: 567+568, SEQ ID NO: 577+578, SEQ ID NO: 587+588, SEQ ID NO: 597+598, SEQ ID NO: 607+608, SEQ ID NO: 617+618, SEQ ID NO: 627+628, SEQ ID NO: 637+638, SEQ ID NO: 647+648, SEQ ID NO: 657+658, SEQ ID NO: 667+668, SEQ ID NO: 677+678, SEQ ID NO: 687+688, SEQ ID NO: 697+698, SEQ ID NO: 707+708, SEQ ID NO: 717+718, SEQ ID NO: 727+728, SEQ ID NO: 737+738, SEQ ID NO: 747+748, SEQ ID NO: 757+758, SEQ ID NO: 767+768, SEQ ID NO: 777+778, SEQ ID NO: 787+788, SEQ ID NO: 797+798, SEQ ID NO: 807+808, SEQ ID NO: 817+818, SEQ ID NO: 827+828, SEQ ID NO: 837+838, SEQ ID NO: 847+848, SEQ ID NO: 857+858, SEQ ID NO: 867+868, SEQ ID NO: 877+878, SEQ ID NO: 887+888, SEQ ID NO: 897+898, SEQ ID NO: 907+908, SEQ ID NO: 917+918, SEQ ID NO: 927+928, SEQ ID NO: 937+938, SEQ ID NO: 947+948, SEQ ID NO: 957+958, SEQ ID NO: 967+968, SEQ ID NO: 977+978, and SEQ ID NO: 987+988, particularly SEQ ID Nos: 727+728, 767+568, 757+758, preferably SEQ ID NO: 727+728.
(xli) Further, the present invention relates to a method of treating cancer with an antibody construct as defined above, particularly with a cancer immunotherapy, more particularly of FLT3+ target cells according to any one of embodiments (i) to (xli), further comprising the prevention, prophylaxis, or reduction of adverse events associated with immunotherapy, particularly cancer immunotherapy, more particularly a blood cell-related cancer, such as leukemia and/or lymphoma, particularly myeloid leukemia, more particularly AML, wherein an antibody construct is administered that comprises at least one domain which binds to FLT3 on the surface of a target cell, and at least one other domain which binds to CD3, preferably human CD3, on the surface of a T cell, according to any one of embodiments (i) to (xiv) of general Aspect A) and as further defined in Sub-Aspect B-3, wherein the domain binds to FLT3 and comprises a polypeptide selected from the group consisting of those depicted in SEQ ID NO: 349, SEQ ID NO: 359, SEQ ID NO: 369, SEQ ID NO: 379, SEQ ID NO: 389, SEQ ID NO: 399, SEQ ID NO: 409, SEQ ID NO: 419, SEQ ID NO: 429, SEQ ID NO: 439, SEQ ID NO: 449, SEQ ID NO: 459, SEQ ID NO: 469, SEQ ID NO: 479, SEQ ID NO: 489, SEQ ID NO: 499, SEQ ID NO: 509, SEQ ID NO: 519, SEQ ID NO: 529, SEQ ID NO: 539, SEQ ID NO: 549, SEQ ID NO: 559, SEQ ID NO: 569, SEQ ID NO: 579, SEQ ID NO: 589, SEQ ID NO: 599, SEQ ID NO: 609, SEQ ID NO: 619, SEQ ID NO: 629, SEQ ID NO: 639, SEQ ID NO: 649, SEQ ID NO: 659, SEQ ID NO: 669, SEQ ID NO: 679, SEQ ID NO: 689, SEQ ID NO: 699, SEQ ID NO: 709, SEQ ID NO: 719, SEQ ID NO: 729, SEQ ID NO: 739, SEQ ID NO: 749, SEQ ID NO: 759, SEQ ID NO: 769, SEQ ID NO: 779, SEQ ID NO: 789, SEQ ID NO: 799, SEQ ID NO: 809, SEQ ID NO: 819, SEQ ID NO: 829, SEQ ID NO: 839, SEQ ID NO: 849, SEQ ID NO: 859, SEQ ID NO: 869, SEQ ID NO: 879, SEQ ID NO: 889, SEQ ID NO: 899, SEQ ID NO: 909, SEQ ID NO: 919, SEQ ID NO: 929, SEQ ID NO: 939, SEQ ID NO: 949, SEQ ID NO: 959, SEQ ID NO: 969, SEQ ID NO: 979, and SEQ ID NO: 989, particularly SEQ ID NOS: 729, 759, 569, preferably SEQ ID NO: 729.
(xlii) Further, the present invention relates to a method of treating cancer with an antibody construct as defined above, particularly with a cancer immunotherapy, more particularly of FLT3+ target cells according to any one of embodiments (i) to (xlii), further comprising the prevention, prophylaxis, or reduction of adverse events associated with immunotherapy, particularly cancer immunotherapy, more particularly a blood cell-related cancer, such as leukemia and/or lymphoma, particularly myeloid leukemia, more particularly AML, wherein an antibody construct is administered that comprises at least one domain which binds to FLT3 on the surface of a target cell, and at least one other domain which binds to CD3, preferably human CD3, on the surface of a T cell, according to any one of embodiments (i) to (xiv) of general Aspect A) and as further defined in embodiments of Sub-Aspect B-3, wherein the peptide binding to CD3 and FLT3 as used herein may be selected, for example, from the group comprising SEQ ID Nos: 350, 360, 370, 380, 390, 400, 410, 420, 430, 440, 450, 460, 470, 480, 490, 500, 510, 520, 530, 540, 550, 560, 570, 580, 590, 600, 610, 620, 630, 640, 650, 660, 670, 680, 690, 700, 710, 720, 730, 740, 750, 760, 770, 780, 790, 800, 810, 820, 830, 840, 850, 860, 870, 880, 890, 900, 910, 920, 930, 940, 950, 960, 970, 980, and 990, particularly SEQ ID Nos: 570, 760, and 730, preferably SEQ ID NO: 730.
(xliii) Further, the present invention relates to a method of treating cancer with an antibody construct as defined above, particularly with a cancer immunotherapy, more particularly of FLT3+ target cells according to any one of embodiments (i) to (xliv), further comprising the prevention, prophylaxis, or reduction of adverse events associated with immunotherapy, particularly cancer immunotherapy, more particularly a blood cell-related cancer, such as leukemia and/or lymphoma, particularly myeloid leukemia, more particularly AML, wherein an antibody construct is administered that comprises at least one domain which binds to FLT3 on the surface of a target cell, and at least one other domain which binds to CD3, preferably human CD3, on the surface of a T cell, according to any one of embodiments (i) to (xiv) of general Aspect A) and as further defined in embodiments of Sub-Aspect B-3, wherein the first domain which binds to FLT3 competes for binding to FLT3 with an antibody construct in accordance with the present invention that is characterized by a domain which binds to FLT3 comprising a VL region and a VH region consisting a VL region as depicted in SEQ ID NO: 309 and a VH region as depicted in SEQ ID NO: 308, or with an antibody construct having a domain which binds to FLT3 comprises a VL region comprising CDR-LL CDR-L2 and CDR-L3 and a VH region comprising CDR-H1, CDR-H2 and CDR-H3, wherein the CDR sequences are selected from: SEQ ID NOs: 344-346, SEQ ID NOs: 354-356, SEQ ID NOs: 364-366, SEQ ID NOs: 374-376, SEQ ID NOs: 384-386, SEQ ID NOs: 394-396, SEQ ID NOs: 404-406, SEQ ID NOs: 414-416, SEQ ID NOs: 424-426, SEQ ID NOs: 434-436, SEQ ID NOs: 444-446, SEQ ID NOs: 454-456, SEQ ID NOs: 464-466, SEQ ID NOs: 474-476, SEQ ID NOs: 484-486, SEQ ID NOs: 494-496, SEQ ID NOs: 504-506, SEQ ID NOs: 514-516, SEQ ID NOs: 524-526, SEQ ID NOs: 534-536, SEQ ID NOs: 544-546, SEQ ID NOs: 554-556, SEQ ID NOs: 564-566, SEQ ID NOs: 574-576, SEQ ID NOs: 584-586, SEQ ID NOs: 594-596, SEQ ID NOs: 604-606, SEQ ID NOs: 614-616, SEQ ID NOs: 624-626, SEQ ID NOs: 634-636, SEQ ID NOs: 644-646, SEQ ID NOs: 654-656, SEQ ID NOs: 664-666, SEQ ID NOs: 674-676, SEQ ID NOs: 684-686, SEQ ID NOs: 694-696, SEQ ID NOs: 704-706, SEQ ID NOs: 714-716, SEQ ID NOs: 724-726, SEQ ID NOs: 734-736, SEQ ID NOs: 744-746, SEQ ID NOs: 754-756, SEQ ID NOs: 764-766, SEQ ID NOs: 774-776, SEQ ID NOs: 784-786, SEQ ID NOs: 794-796, SEQ ID NOs: 804-806, SEQ ID NOs: 814-816, SEQ ID NOs: 824-826, SEQ ID NOs: 834-836, SEQ ID NOs: 844-846, SEQ ID NOs: 854-856, SEQ ID NOs: 864-866, SEQ ID NOs: 874-876, SEQ ID NOs: 884-886, SEQ ID NOs: 894-896, SEQ ID NOs: 904-906, SEQ ID NOs: 914-916, SEQ ID NOs: 924-926, SEQ ID NOs: 934-936, SEQ ID NOs: 944-946, SEQ ID NOs: 954-956, SEQ ID NOs: 964-966, SEQ ID NOs: 974-976, SEQ ID NOs: 984-986, particularly SEQ ID Nos: 564-566, SEQ ID Nos: 754-756, SEQ ID NOs: 724-726, and preferably SEQ ID NOs: 724-726, and SEQ ID NOs: 341-343; SEQ ID NOs: 351-353, SEQ ID NOs: 361-363, SEQ ID NOs: 371-373, SEQ ID NOs: 381-383, SEQ ID NOs: 391-393, SEQ ID NOs: 401-403, SEQ ID NOs: 411-413, SEQ ID NOs: 421-423, SEQ ID NOs: 431-433, SEQ ID NOs: 441-443, SEQ ID NOs: 451-453, SEQ ID NOs: 461-463, SEQ ID NOs: 471-473, SEQ ID NOs: 481-483, SEQ ID NOs: 491-493, SEQ ID NOs: 501-503, SEQ ID NOs: 511-513, SEQ ID NOs: 521-523, SEQ ID NOs: 531-533, SEQ ID NOs: 541-543, SEQ ID NOs: 551-553, SEQ ID NOs: 561-563, SEQ ID NOs: 571-573, SEQ ID NOs: 581-583, SEQ ID NOs: 591-593, SEQ ID NOs: 601-603, SEQ ID NOs: 611-613, SEQ ID NOs: 621-623, SEQ ID NOs: 631-633, SEQ ID NOs: 641-643, SEQ ID NOs: 651-653, SEQ ID NOs: 661-663, SEQ ID NOs: 671-673, SEQ ID NOs: 681-683, SEQ ID NOs: 691-693, SEQ ID NOs: 701-703, SEQ ID NOs: 711-713, SEQ ID NOs: 721-723, SEQ ID NOs: 731-733, SEQ ID NOs: 741-743, SEQ ID NOs: 751-753, SEQ ID NOs: 761-763, SEQ ID NOs: 771-773, SEQ ID NOs: 781-783, SEQ ID NOs: 791-793, SEQ ID NOs: 801-803, SEQ ID NOs: 811-813, SEQ ID NOs: 821-823, SEQ ID NOs: 831-833, SEQ ID NOs: 841-843, SEQ ID NOs: 851-853, SEQ ID NOs: 861-863, SEQ ID NOs: 871-873, SEQ ID NOs: 881-883, SEQ ID NOs: 891-896, SEQ ID NOs: 901-903, SEQ ID NOs: 911-913, SEQ ID NOs: 921-923, SEQ ID NOs: 931-933, SEQ ID NOs: 941-943, SEQ ID NOs: 951-953, SEQ ID NOs: 961-963, SEQ ID NOs: 971-973, SEQ ID NOs: 981-983, particularly SEQ ID Nos: 561-563, SEQ ID Nos: 751-753, SEQ ID NOs: 721-723, and preferably SEQ ID NOs: 721-723.
(xliv) Further, the present invention relates to a method of treating cancer with an antibody construct as defined above, particularly with a cancer immunotherapy, more particularly of FLT3+ target cells according to any one of embodiments (i) to (xlv), wherein the adverse event associated with immunotherapy is increased cytokine release of TNF, IL-1, MCP-1, and/or IL-6, particularly wherein the adverse event is cytokine release syndrome (CRS) or tumor lysis syndrome (TLS), wherein the adverse events may also include a neurological reaction, selected from the group comprising confusion, ataxia, disorientation, dysphasia, aphasia, speech impairment, cerebellar symptoms, tremor, apraxia, seizure, grand mal convulsion, palsy, and balance disorder.
(xlv) Further, the present invention relates to a method of treating cancer with an antibody construct as defined above, particularly with a cancer immunotherapy, more particularly of FLT3+ target cells according to any one of embodiments (i) to (xlvi), wherein the domain of said antibody construct binds to CD3, preferably human CD3, epsilon and to Callithrix jacchus or Saimiri sciureus CD3 epsilon.
(xlvi) Further, the present invention relates to a method of treating cancer with an antibody construct as defined above, particularly with a cancer immunotherapy, more particularly of FLT3+ target cells according to any one of embodiments (i) to (xlvii), wherein
[0586] (a) the antibody construct is a single chain antibody construct,
[0587] (b) the first domain is in the format of an scFv,
[0588] (c) the second domain is in the format of an scFv,
[0589] (d) the first and the second domain are connected via a linker, and/or
[0590] (e) the antibody construct comprises a domain providing an extended serum half-life.
   (xlvii) Further, the present invention relates to a method of treating cancer with an antibody construct as defined above, particularly with a cancer immunotherapy, more particularly of FLT3+ target cells according to any one of embodiments (i) to (xlviii), wherein the inhibitor/antagonist of TNF/TNFR that reduces TNF/TNFR signaling is selected from the group comprising small molecules, biological molecules, antibodies and derivatives thereof, aptamers, and the like.
   (xlviii) Further, the present invention relates to a method of treating cancer with an antibody construct as defined above, particularly with a cancer immunotherapy, more particularly of FLT3+ target cells according to any one of embodiments (i) to (xlix), wherein the inhibitor/antagonist of TNF/TNFR that reduces TNF/TNFR signaling is selected from the group of TNF inhibitors comprising etanercept, infliximab, adalimumab, certolizumab Pergol, and golimumab, particularly etanercept.
   (xlix) Further, the present invention relates to a method of treating cancer with an antibody construct as defined above, particularly with a cancer immunotherapy, more particularly of FLT3+ target cells according to any one of embodiments (i) to (1), for administration to a patient at risk of developing adverse events or having an intolerance to at least one of a group comprising corticosteroids, IL-6-inhibitors, IL-6R-inhibitors, and/or TNF/TNFR inhibitors different from an inhibitor/antagonist of TNF/TNFR that reduces TNF/TNFR signaling according to any of the preceding embodiments.
   (l) Further, the present invention relates to a method of treating cancer with an antibody construct as defined above, particularly with a cancer immunotherapy, more particularly of FLT3+ target cells according to any one of embodiments (i) to (10, for administration to a patient at risk of developing adverse events or having an intolerance to corticosteroids, wherein the corticosteroid is dexamethasone.
   (li) Further, the present invention relates to a method of treating cancer with an antibody construct as defined above, particularly with a cancer immunotherapy, more particularly of FLT3+ target cells according to any one of embodiments (i) to (lii), for administration to a patient at risk of developing adverse events or having an intolerance to IL-6-antagonists and/or IL-6R-antagonists, wherein the IL-6-antagonists and/or IL-6R-antagonists are selected from the group comprising tocilizumab, siltuximab, olokizumab, elsilimomab, clazakizumab, sirukumab, particularly tocilizumab, and/or wherein said combination product is for administration to a patient at risk of developing adverse events or having an intolerance to TNF/TNFR inhibitors, wherein the TNF/TNFR inhibitor is selected from the group comprising infliximab, adalimumab, certolizumab Pergol, and/or golimumab.
   (lii) Further, the present invention relates to a method of treating cancer with an antibody construct as defined above, particularly with a cancer immunotherapy, more particularly of FLT3+ target cells according to any one of embodiments (i) to (liii), further comprising administering at least one corticosteroid, particularly wherein said corticostoid is dexamethasone.
   (liii) Further, the present invention relates to a method of treating cancer with an antibody construct as defined above, particularly with a cancer immunotherapy, more particularly of FLT3+ target cells according to any one of embodiments (i) to (liii), further comprising administering an IL-6R-antagonist, wherein said IL-6R-antagonist is tocilizumab.
   (liv) Further, the present invention relates to a method of treating cancer with an antibody construct as defined above, particularly with a cancer immunotherapy, more particularly of FLT3+ target cells according to any one of embodiments (i) to (liv), further comprising administering at least one corticosteroid, particularly dexamethasone and/or at least one IL-6 and/or IL-6R-antagonist, particularly tocilizumab, wherein said at least one corticosteroid and/or said IL-6 and/or IL-6R-antagonist is for administration to a patient in need thereof prior to, concomitant with, and/or after administration of said antibody construct.
   Sub-Aspect F-4—Dosing of an TNF/TNFR Inhibitor/Antagonist Together with Antibody Constructs Binding PSMA

[0591] The present invention relates also to a method/a use of an inhibitor/antagonist of TNF/TNFR that reduces TNF/TNFR signaling as defined in any of the foregoing embodiments (i) to (xiv) in general Aspect A for the prevention of adverse events associated with immunotherapy, particularly of cancer immunotherapy, very particularly of CRS due to immunotherapy, very particularly in the treatment of a PSMA+ cancer, such as prostate cancer, in accordance with any of the methods as defined explicitly in Aspect B, particularly in Sub-Aspect B-4, in a patient who is at risk of CRS or TLS as defined in the preceding embodiments, wherein said patient is a person subjected to therapy with an antibody construct comprising a first domain which binds to a target antigen on the surface of a target cell, and a second domain which binds to CD3, preferably human CD3, on the surface of a T cell as defined in any of the foregoing embodiments, wherein a first dose of said inhibitor is administered before administration of a first dose of said antibody construct, and wherein said antibody construct binds PSMA. Further embodiments are set forth below:

(i) A method of treating cancer with an antibody construct as defined above, particularly with a cancer immunotherapy, more particularly of PSMA+ target cells, such as prostate cancer, wherein said method comprises the steps:
[0592] (a) Administering an inhibitor/antagonist of TNF-alpha/TNF-alpha-Receptor reducing TNF-alpha/TNF-alpha-Receptor signaling as defined in any of the foregoing sections,
[0593] (b) Administering an antibody construct that binds PSMA on a target cell and CD3 on a T cell,
   wherein a first dose of said inhibitor is administered before administration of a first dose of said antibody construct.
   (ii) The method of treating cancer with an antibody construct as defined above, particularly with a cancer immunotherapy, more particularly of PSMA+ target cells, such as prostate cancer, according to embodiment (i), wherein said method comprises the steps:
[0594] (a) Administering an inhibitor/antagonist of TNF-alpha/TNF-alpha-Receptor reducing TNF-alpha/TNF-alpha-Receptor signaling as defined in any of the foregoing sections,
[0595] (b) Administering an antibody construct that binds PSMA on a target cell and CD3 on a T cell,
   wherein said method comprises the prevention, prophylaxis, amelioration, reduction and/or alleviation of adverse events associated with immunotherapy, particularly of cancer immunotherapy, more particularly of cytokine release syndrome (CRS) or tumor lysis syndrome (TLS) in a patient as defined in the preceding embodiment, particularly a patient who is at risk of developing CRS or TLS.
   (iii) The method of treating cancer with an antibody construct as defined above, particularly with a cancer immunotherapy, more particularly of PSMA+ target cells, such as prostate cancer, according to any one of embodiments (i) and (ii), wherein said method comprises the steps:
[0596] (a) Administering an inhibitor/antagonist of TNF-alpha/TNF-alpha-Receptor reducing TNF-alpha/TNF-alpha-Receptor signaling as defined in any of the foregoing sections,
[0597] (b) Administering an antibody construct that binds PSMA on a target cell and CD3 on a T cell,
   wherein said method comprises the prevention, prophylaxis, amelioration, reduction and/or alleviation of adverse events associated with immunotherapy, particularly of cancer immunotherapy, more particularly of CRS or TLS in a patient as defined in the preceding embodiment, particularly a patient who is at risk of developing CRS or TLS, wherein at least one further dose, preferably a second dose, of said inhibitor is administered before administration of said antibody construct.
   (iv) The method of treating cancer with an antibody construct as defined above, particularly with a cancer immunotherapy, more particularly of PSMA+ target cells, such as prostate cancer, according to any one of embodiments (i) to (iii), wherein said method comprises the steps:
[0598] (a) Administering an inhibitor/antagonist of TNF-alpha/TNF-alpha-Receptor reducing TNF-alpha/TNF-alpha-Receptor signaling as defined in any of the foregoing sections,
[0599] (b) Administering an antibody construct that binds PSMA on a target cell and CD3 on a T cell,
   wherein said method comprises the prevention, prophylaxis, amelioration, reduction and/or alleviation of adverse events associated with immunotherapy, particularly of cancer immunotherapy, more particularly of CRS or TLS in a patient as defined in the preceding embodiment, particularly a patient who is at risk of developing CRS or TLS, wherein a first dose, optionally also at least one further dose, of said inhibitor is administered before administration of said antibody construct, and wherein a further dose of said inhibitor is administered following administration of said antibody construct.
   (v) The method of treating cancer with an antibody construct as defined above, particularly with a cancer immunotherapy, more particularly of PSMA+ target cells, such as prostate cancer, according to any one of embodiments (i) to (iv), wherein said method comprises the steps:
[0600] (a) Administering an inhibitor/antagonist of TNF-alpha/TNF-alpha-Receptor reducing TNF-alpha/TNF-alpha-Receptor signaling as defined in any of the foregoing sections,
[0601] (b) Administering an antibody construct that binds PSMA on a target cell and CD3 on a T cell,
   wherein said method comprises the prevention, prophylaxis, amelioration, reduction and/or alleviation of adverse events associated with immunotherapy, particularly of cancer immunotherapy, more particularly of CRS or TLS in a patient as defined in the preceding embodiment, particularly a patient who is at risk of developing CRS or TLS, wherein a first dose, optionally also at least one further dose, of said inhibitor is administered before administration of said antibody construct, and wherein at least one further dose of said inhibitor is administered following administration of said antibody construct, wherein the first dose of said inhibitor is administered within a first period before administration of the antibody construct, wherein optionally also said further dose of said inhibitor is administered within a second period before administration of the antibody construct, wherein another dose of said inhibitor is administered within a third period following administration of said antibody construct.
   (vi) The method of treating cancer with an antibody construct as defined above, particularly with a cancer immunotherapy, more particularly of PSMA+ target cells, such as prostate cancer, according to any one of embodiments (i) to (v), wherein said method comprises the steps:
[0602] (a) Administering an inhibitor/antagonist of TNF-alpha/TNF-alpha-Receptor reducing TNF-alpha/TNF-alpha-Receptor signaling as defined in any of the foregoing sections,
[0603] (b) Administering an antibody construct that binds PSMA on a target cell and CD3 on a T cell,
   wherein said method comprises the prevention, prophylaxis, amelioration, reduction and/or alleviation of adverse events associated with immunotherapy, particularly of cancer immunotherapy, more particularly of CRS or TLS in a patient as defined in the preceding embodiment, particularly a patient who is at risk of developing CRS or TLS, wherein a first dose, optionally also at least one further dose, of said inhibitor is administered before administration of said antibody construct, and wherein at least one further dose of said inhibitor is administered following administration of said antibody construct, wherein the first dose of said inhibitor is administered within a first period before administration of the antibody construct, wherein optionally also said at least one further dose of said inhibitor is administered within a second period before administration of the antibody construct, wherein another dose of said inhibitor is administered within a third period following administration of said antibody construct, wherein the first dose of said inhibitor is administered within a first period before administration of the antibody construct, said period ranging from 30 minutes to 7 days prior to administration of the antibody construct.
   (vii) The method of treating cancer with an antibody construct as defined above, particularly with a cancer immunotherapy, more particularly of PSMA+ target cells, such as prostate cancer, according to any one of embodiments (i) to (vi), wherein said method comprises the steps:
[0604] (a) Administering an inhibitor/antagonist of TNF-alpha/TNF-alpha-Receptor reducing TNF-alpha/TNF-alpha-Receptor signaling as defined in any of the foregoing sections,
[0605] (b) Administering an antibody construct that binds PSMA on a target cell and CD3 on a T cell,
   wherein said method comprises the prevention, prophylaxis, amelioration, reduction and/or alleviation of adverse events associated with immunotherapy, particularly of cancer immunotherapy, more particularly of CRS or TLS in a patient as defined in the preceding embodiment, particularly a patient who is at risk of developing CRS or TLS, wherein a first dose, optionally also at least one further dose, of said inhibitor is administered before administration of said antibody construct, and wherein at least one further dose of said inhibitor is administered following administration of said antibody construct, wherein the first dose of said inhibitor is administered within a first period before administration of the antibody construct, wherein optionally also said at least one further dose of said inhibitor is administered within a second period before administration of the antibody construct, wherein another dose of said inhibitor is administered within a third period following administration of said antibody construct, wherein the first dose of said inhibitor is administered within a first period before administration of the antibody construct, said period ranging from 30 minutes to 6 days prior to administration of the antibody construct.
   (viii) The method of treating cancer with an antibody construct as defined above, particularly with a cancer immunotherapy, more particularly of PSMA+ target cells, such as prostate cancer, according to any one of embodiments (i) to (vii), wherein said method comprises the steps:
[0606] (a) Administering an inhibitor/antagonist of TNF-alpha/TNF-alpha-Receptor reducing TNF-alpha/TNF-alpha-Receptor signaling as defined in any of the foregoing sections,
[0607] (b) Administering an antibody construct that binds PSMA on a target cell and CD3 on a T cell,
   wherein said method comprises the prevention, prophylaxis, amelioration, reduction and/or alleviation of adverse events associated with immunotherapy, particularly of cancer immunotherapy, more particularly of CRS or TLS in a patient as defined in the preceding embodiment, particularly a patient who is at risk of developing CRS or TLS, wherein a first dose, optionally also at least one further dose, of said inhibitor is administered before administration of said antibody construct, and wherein at least one further dose of said inhibitor is administered following administration of said antibody construct, wherein the first dose of said inhibitor is administered within a first period before administration of the antibody construct, wherein optionally also said further dose of said inhibitor is administered within a second period before administration of the antibody construct, wherein another dose of said inhibitor is administered within a third period following administration of said antibody construct, wherein the first dose of said inhibitor is administered within a first period before administration of the antibody construct, said period ranging from 30 minutes to 5 days prior to administration of the antibody construct.
   (ix) The method of treating cancer with an antibody construct as defined above, particularly with a cancer immunotherapy, more particularly of PSMA+ target cells, such as prostate cancer, according to any one of embodiments (i) to (viii), wherein said method comprises the steps:
[0608] (a) Administering an inhibitor/antagonist of TNF-alpha/TNF-alpha-Receptor reducing TNF-alpha/TNF-alpha-Receptor signaling as defined in any of the foregoing sections,
[0609] (b) Administering an antibody construct that binds PSMA on a target cell and CD3 on a T cell,
   wherein said method comprises the prevention, prophylaxis, amelioration, reduction and/or alleviation of adverse events associated with immunotherapy, particularly of cancer immunotherapy, more particularly of CRS or TLS in a patient as defined in the preceding embodiment, particularly a patient who is at risk of developing CRS or TLS, wherein a first dose, optionally also at least one further dose, of said inhibitor is administered before administration of said antibody construct, and wherein at least one further dose of said inhibitor is administered following administration of said antibody construct, wherein the first dose of said inhibitor is administered within a first period before administration of the antibody construct, wherein optionally also said further dose of said inhibitor is administered within a second period before administration of the antibody construct, wherein another dose of said inhibitor is administered within a third period following administration of said antibody construct, wherein the first dose of said inhibitor is administered within a first period before administration of the antibody construct, said period ranging from 30 minutes to 4 days prior to administration of the antibody construct.
   (x) The method of treating cancer with an antibody construct as defined above, particularly with a cancer immunotherapy, more particularly of PSMA+ target cells, such as prostate cancer, according to any one of embodiments (i) to (ix), wherein said method comprises the steps:
[0610] (a) Administering an inhibitor/antagonist of TNF-alpha/TNF-alpha-Receptor reducing TNF-alpha/TNF-alpha-Receptor signaling as defined in any of the foregoing sections,
[0611] (b) Administering an antibody construct that binds PSMA on a target cell and CD3 on a T cell,
   wherein said method comprises the prevention, prophylaxis, amelioration, reduction and/or alleviation of adverse events associated with immunotherapy, particularly of cancer immunotherapy, more particularly of CRS or TLS in a patient as defined in the preceding embodiment, particularly a patient who is at risk of developing CRS or TLS, wherein a first dose, optionally also at least one further dose, of said inhibitor is administered before administration of said antibody construct, and wherein at least one further dose of said inhibitor is administered following administration of said antibody construct, wherein the first dose of said inhibitor is administered within a first period before administration of the antibody construct, wherein optionally also said further dose of said inhibitor is administered within a second period before administration of the antibody construct, wherein another dose of said inhibitor is administered within a third period following administration of said antibody construct, wherein the first dose of said inhibitor is administered within a first period before administration of the antibody construct, said period ranging from 30 minutes to 3 days prior to administration of the antibody construct.
   (xi) The method of treating cancer with an antibody construct as defined above, particularly with a cancer immunotherapy, more particularly of PSMA+ target cells, such as prostate cancer, according to any one of embodiments (i) to (x), wherein said method comprises the steps:
[0612] (a) Administering an inhibitor/antagonist of TNF-alpha/TNF-alpha-Receptor reducing TNF-alpha/TNF-alpha-Receptor signaling as defined in any of the foregoing sections,
[0613] (b) Administering an antibody construct that binds PSMA on a target cell and CD3 on a T cell,
   wherein said method comprises the prevention, prophylaxis, amelioration, reduction and/or alleviation of adverse events associated with immunotherapy, particularly of cancer immunotherapy, more particularly of CRS or TLS in a patient as defined in the preceding embodiment, particularly a patient who is at risk of developing CRS or TLS, wherein a first dose, optionally also at least one further dose, of said inhibitor is administered before administration of said antibody construct, and wherein at least one further dose of said inhibitor is administered following administration of said antibody construct, wherein the first dose of said inhibitor is administered within a first period before administration of the antibody construct, wherein optionally also said further dose of said inhibitor is administered within a second period before administration of the antibody construct, wherein another dose of said inhibitor is administered within a third period following administration of said antibody construct, wherein the first dose of said inhibitor is administered within a first period before administration of the antibody construct, said period ranging from 30 minutes to 2 days prior to administration of the antibody construct.
   (xii) The method of treating cancer with an antibody construct as defined above, particularly with a cancer immunotherapy, more particularly of PSMA+ target cells, such as prostate cancer, according to any one of embodiments (i) to (xi), wherein said method comprises the steps:
[0614] (a) Administering an inhibitor/antagonist of TNF-alpha/TNF-alpha-Receptor reducing TNF-alpha/TNF-alpha-Receptor signaling as defined in any of the foregoing sections,
[0615] (b) Administering an antibody construct that binds PSMA on a target cell and CD3 on a T cell,
   wherein said method comprises the prevention, prophylaxis, amelioration, reduction and/or alleviation of adverse events associated with immunotherapy, particularly of cancer immunotherapy, more particularly of CRS or TLS in a patient as defined in the preceding embodiment, particularly a patient who is at risk of developing CRS or TLS, wherein a first dose, optionally also at least one further dose, of said inhibitor is administered before administration of said antibody construct, and wherein at least one further dose of said inhibitor is administered following administration of said antibody construct, wherein the first dose of said inhibitor is administered within a first period before administration of the antibody construct, wherein optionally also said further dose of said inhibitor is administered within a second period before administration of the antibody construct, wherein another dose of said inhibitor is administered within a third period following administration of said antibody construct, wherein the first dose of said inhibitor is administered within a first period before administration of the antibody construct, said period ranging from 30 minutes to 1 day prior to administration of the antibody construct.
   (xiii) The method of treating cancer with an antibody construct as defined above, particularly with a cancer immunotherapy, more particularly of PSMA+ target cells, such as prostate cancer, according to any one of embodiments (i) to (xii), wherein said method comprises the steps:
[0616] (a) Administering an inhibitor/antagonist of TNF-alpha/TNF-alpha-Receptor reducing TNF-alpha/TNF-alpha-Receptor signaling as defined in any of the foregoing sections,
[0617] (b) Administering an antibody construct that binds PSMA on a target cell and CD3 on a T cell,
   wherein said method comprises the prevention, prophylaxis, amelioration, reduction and/or alleviation of adverse events associated with immunotherapy, particularly of cancer immunotherapy, more particularly of CRS or TLS in a patient as defined in the preceding embodiment, particularly a patient who is at risk of developing CRS or TLS, wherein a first dose, optionally also at least one further dose, of said inhibitor is administered before administration of said antibody construct, and wherein at least one further dose of said inhibitor is administered following administration of said antibody construct, wherein the first dose of said inhibitor is administered within a first period before administration of the antibody construct, wherein optionally also said further dose of said inhibitor is administered within a second period before administration of the antibody construct, wherein another dose of said inhibitor is administered within a third period following administration of said antibody construct, wherein the first dose of said inhibitor is administered within a first period before administration of the antibody construct, said period ranging from 60 minutes to 1 day prior to administration of the antibody construct.
   (xiv) The method of treating cancer with an antibody construct as defined above, particularly with a cancer immunotherapy, more particularly of PSMA+ target cells, such as prostate cancer, according to any one of embodiments (i) to (xiii), wherein said method comprises the steps:
[0618] (a) Administering an inhibitor/antagonist of TNF-alpha/TNF-alpha-Receptor reducing TNF-alpha/TNF-alpha-Receptor signaling as defined in any of the foregoing sections,
[0619] (b) Administering an antibody construct that binds PSMA on a target cell and CD3 on a T cell,
   wherein said method comprises the prevention, prophylaxis, amelioration, reduction and/or alleviation of adverse events associated with immunotherapy, particularly of cancer immunotherapy, more particularly of CRS or TLS in a patient as defined in the preceding embodiment, particularly a patient who is at risk of developing CRS or TLS, wherein a first dose, optionally also at least one further dose, of said inhibitor is administered before administration of said antibody construct, and wherein at least one further dose of said inhibitor is administered following administration of said antibody construct, wherein the first dose of said inhibitor is administered within a first period before administration of the antibody construct, wherein optionally also said further dose of said inhibitor is administered within a second period before administration of the antibody construct, wherein another dose of said inhibitor is administered within a third period following administration of said antibody construct, wherein the further dose of said inhibitor is administered within a second period, for example within a second period before administration of the antibody construct, wherein said period is shorter than the first period of administration of the inhibitor.
   (xv) The method of treating cancer with an antibody construct as defined above, particularly with a cancer immunotherapy, more particularly of PSMA+ target cells, such as prostate cancer, according to any one of embodiments (i) to (xvi), wherein said method comprises the steps:
[0620] (a) Administering an inhibitor/antagonist of TNF-alpha/TNF-alpha-Receptor reducing TNF-alpha/TNF-alpha-Receptor signaling as defined in any of the foregoing sections,
[0621] (b) Administering an antibody construct that binds PSMA on a target cell and CD3 on a T cell,
   wherein said method comprises the prevention, prophylaxis, amelioration, reduction and/or alleviation of adverse events associated with immunotherapy, particularly of cancer immunotherapy, more particularly of CRS or TLS in a patient as defined in the preceding embodiment, particularly a patient who is at risk of developing CRS or TLS, wherein a first dose, optionally also at least one further dose, of said inhibitor is administered before administration of said antibody construct, and wherein at least one further dose of said inhibitor is administered following administration of said antibody construct, wherein the first dose of said inhibitor is administered within a first period before administration of the antibody construct, wherein optionally also said further dose of said inhibitor is administered within a second period before administration of the antibody construct, wherein another dose of said inhibitor is administered within a third period following administration of said antibody construct, wherein the further dose of said inhibitor is administered within a second period ranging from 30 minutes to 5 days prior to administration of the antibody construct.
   (xvi) The method of treating cancer with an antibody construct as defined above, particularly with a cancer immunotherapy, more particularly of PSMA+ target cells, such as prostate cancer, according to any one of embodiments (i) to (xv), wherein said method comprises the steps:
[0622] (a) Administering an inhibitor/antagonist of TNF-alpha/TNF-alpha-Receptor reducing TNF-alpha/TNF-alpha-Receptor signaling as defined in any of the foregoing sections,
[0623] (b) Administering an antibody construct that binds PSMA on a target cell and CD3 on a T cell,
   wherein said method comprises the prevention, prophylaxis, amelioration, reduction and/or alleviation of adverse events associated with immunotherapy, particularly of cancer immunotherapy, more particularly of CRS or TLS in a patient as defined in the preceding embodiment, particularly a patient who is at risk of developing CRS or TLS, wherein a first dose, optionally also at least one further dose, of said inhibitor is administered before administration of said antibody construct, and wherein at least one further dose of said inhibitor is administered following administration of said antibody construct, wherein the first dose of said inhibitor is administered within a first period before administration of the antibody construct, wherein optionally also said further dose of said inhibitor is administered within a second period before administration of the antibody construct, wherein another dose of said inhibitor is administered within a third period following administration of said antibody construct, wherein the further dose of said inhibitor is administered within a period ranging from 30 minutes to 4 days prior to administration of the antibody construct.
   (xvii) The method of treating cancer with an antibody construct as defined above, particularly with a cancer immunotherapy, more particularly of PSMA+ target cells, such as prostate cancer, according to any one of embodiments (i) to (xvi), wherein said method comprises the steps:
[0624] (a) Administering an inhibitor/antagonist of TNF-alpha/TNF-alpha-Receptor reducing TNF-alpha/TNF-alpha-Receptor signaling as defined in any of the foregoing sections,
[0625] (b) Administering an antibody construct that binds PSMA on a target cell and CD3 on a T cell,
   wherein said method comprises the prevention, prophylaxis, amelioration, reduction and/or alleviation of adverse events associated with immunotherapy, particularly of cancer immunotherapy, more particularly of CRS or TLS in a patient as defined in the preceding embodiment, particularly a patient who is at risk of developing CRS or TLS, wherein a first dose, optionally also at least one further dose, of said inhibitor is administered before administration of said antibody construct, and wherein at least one further dose of said inhibitor is administered following administration of said antibody construct, wherein the first dose of said inhibitor is administered within a first period before administration of the antibody construct, wherein optionally also said further dose of said inhibitor is administered within a second period before administration of the antibody construct, wherein another dose of said inhibitor is administered within a third period following administration of said antibody construct, wherein the further dose of said inhibitor is administered within a period ranging from 30 minutes to 3 days prior to administration of the antibody construct.
   (xviii) The method of treating cancer with an antibody construct as defined above, particularly with a cancer immunotherapy, more particularly of PSMA+ target cells, such as prostate cancer, according to any one of embodiments (i) to (xvii), wherein said method comprises the steps:
[0626] (a) Administering an inhibitor/antagonist of TNF-alpha/TNF-alpha-Receptor reducing TNF-alpha/TNF-alpha-Receptor signaling as defined in any of the foregoing sections,
[0627] (b) Administering an antibody construct that binds PSMA on a target cell and CD3 on a T cell,
   wherein said method comprises the prevention, prophylaxis, amelioration, reduction and/or alleviation of adverse events associated with immunotherapy, particularly of cancer immunotherapy, more particularly of CRS or TLS in a patient as defined in the preceding embodiment, particularly a patient who is at risk of developing CRS or TLS, wherein a first dose, optionally also at least one further dose, of said inhibitor is administered before administration of said antibody construct, and wherein at least one further dose of said inhibitor is administered following administration of said antibody construct, wherein the first dose of said inhibitor is administered within a first period before administration of the antibody construct, wherein optionally also said further dose of said inhibitor is administered within a second period before administration of the antibody construct, wherein another dose of said inhibitor is administered within a third period following administration of said antibody construct, wherein the further dose of said inhibitor is administered within a period ranging from 30 minutes to 2 days prior to administration of the antibody construct.
   (xix) The method of treating cancer with an antibody construct as defined above, particularly with a cancer immunotherapy, more particularly of PSMA+ target cells, such as prostate cancer, according to any one of embodiments (i) to (xviii), wherein said method comprises the steps:
[0628] (a) Administering an inhibitor/antagonist of TNF-alpha/TNF-alpha-Receptor reducing TNF-alpha/TNF-alpha-Receptor signaling as defined in any of the foregoing sections,
[0629] (b) Administering an antibody construct that binds PSMA on a target cell and CD3 on a T cell,
   wherein said method comprises the prevention, prophylaxis, amelioration, reduction and/or alleviation of adverse events associated with immunotherapy, particularly of cancer immunotherapy, more particularly of CRS or TLS in a patient as defined in the preceding embodiment, particularly a patient who is at risk of developing CRS or TLS, wherein a first dose, optionally also at least one further dose, of said inhibitor is administered before administration of said antibody construct, and wherein at least one further dose of said inhibitor is administered following administration of said antibody construct, wherein the first dose of said inhibitor is administered within a first period before administration of the antibody construct, wherein optionally also said further dose of said inhibitor is administered within a second period before administration of the antibody construct, wherein another dose of said inhibitor is administered within a third period following administration of said antibody construct, wherein the further dose of said inhibitor is administered within a period ranging from 30 minutes to 1 day prior to administration of the antibody construct.
   (xx) The method of treating cancer with an antibody construct as defined above, particularly with a cancer immunotherapy, more particularly of PSMA+ target cells, such as prostate cancer, according to any one of embodiments (i) to (xix), wherein said method comprises the steps:
[0630] (a) Administering an inhibitor/antagonist of TNF-alpha/TNF-alpha-Receptor reducing TNF-alpha/TNF-alpha-Receptor signaling as defined in any of the foregoing sections,
[0631] (b) Administering an antibody construct that binds PSMA on a target cell and CD3 on a T cell,
   wherein said method comprises the prevention, prophylaxis, amelioration, reduction and/or alleviation of adverse events associated with immunotherapy, particularly of cancer immunotherapy, more particularly of CRS or TLS in a patient as defined in the preceding embodiment, particularly a patient who is at risk of developing CRS or TLS, wherein a first dose, optionally also at least one further dose, of said inhibitor is administered before administration of said antibody construct, and wherein further dose of said inhibitor is administered following administration of said antibody construct, wherein the first dose of said inhibitor is administered within a first period before administration of the antibody construct, wherein optionally also said further dose of said inhibitor is administered within a second period before administration of the antibody construct, wherein another dose of said inhibitor is administered within a third period following administration of said antibody construct, wherein the first dose and at least one further dose of said inhibitor comprise different quantities of inhibitor and/or different quantities of the antibody construct.
   (xxi) The method of treating cancer with an antibody construct as defined above, particularly with a cancer immunotherapy, more particularly of PSMA+ target cells, such as prostate cancer, according to any one of embodiments (i) to (xx), wherein said method comprises the steps:
[0632] (a) Administering an inhibitor/antagonist of TNF-alpha/TNF-alpha-Receptor reducing TNF-alpha/TNF-alpha-Receptor signaling as defined in any of the foregoing sections,
[0633] (b) Administering an antibody construct that binds PSMA on a target cell and CD3 on a T cell,
   wherein said method comprises the prevention, prophylaxis, amelioration, reduction and/or alleviation of adverse events associated with immunotherapy, particularly of cancer immunotherapy, more particularly of CRS or TLS in a patient as defined in the preceding embodiment, particularly a patient who is at risk of developing CRS or TLS, wherein a first dose, optionally also at least one further dose, of said inhibitor is administered before administration of said antibody construct, and wherein at least one further dose of said inhibitor is administered following administration of said antibody construct, wherein the first dose of said inhibitor is administered within a first period before administration of the antibody construct, wherein optionally also said further dose of said inhibitor is administered within a second period before administration of the antibody construct, wherein another dose of said inhibitor is administered within a third period following administration of said antibody construct, wherein the first dose and at least one further dose of said inhibitor comprise identical quantities of inhibitor and/or identical quantities of the antibody construct.
   (xxii) The method of treating cancer with an antibody construct as defined above, particularly with a cancer immunotherapy, more particularly of PSMA+ target cells, such as prostate cancer, according to any one of embodiments (i) to (xxi), wherein said method comprises the steps:
[0634] (a) Administering an inhibitor/antagonist of TNF-alpha/TNF-alpha-Receptor reducing TNF-alpha/TNF-alpha-Receptor signaling as defined in any of the foregoing sections,
[0635] (b) Administering an antibody construct that binds PSMA on a target cell and CD3 on a T cell,
   wherein said method comprises the prevention, prophylaxis, amelioration, reduction and/or alleviation of adverse events associated with immunotherapy, particularly of cancer immunotherapy, more particularly of CRS or TLS in a patient as defined in the preceding embodiment, particularly a patient who is at risk of developing CRS or TLS, wherein a first dose, optionally also at least one further dose, of said inhibitor is administered before administration of said antibody construct, and wherein at least one further dose of said inhibitor is administered following administration of said antibody construct, wherein the first dose of said inhibitor is administered within a first period before administration of the antibody construct, wherein optionally also said further dose of said inhibitor is administered within a second period before administration of the antibody construct, wherein another dose of said inhibitor is administered within a third period following administration of said antibody construct, wherein another dose of said inhibitor is administered following administration of said antibody construct within a period from 1 day to 7 days following a first administration of a dose of said antibody construct.
   (xxiii) The method of treating cancer with an antibody construct as defined above, particularly with a cancer immunotherapy, more particularly of PSMA+ target cells, such as prostate cancer, according to any one of embodiments (i) to (xxii), wherein said method comprises the steps:
[0636] (a) Administering an inhibitor/antagonist of TNF-alpha/TNF-alpha-Receptor reducing TNF-alpha/TNF-alpha-Receptor signaling as defined in any of the foregoing sections,
[0637] (b) Administering an antibody construct that binds PSMA on a target cell and CD3 on a T cell,
   wherein said method comprises the prevention, prophylaxis, amelioration, reduction and/or alleviation of adverse events associated with immunotherapy, particularly of cancer immunotherapy, more particularly of CRS or TLS in a patient as defined in the preceding embodiment, particularly a patient who is at risk of developing CRS or TLS, wherein a first dose, optionally also at least one further dose, of said inhibitor is administered before administration of said antibody construct, and wherein at least one further dose of said inhibitor is administered following administration of said antibody construct, wherein the first dose of said inhibitor is administered within a first period before administration of the antibody construct, wherein optionally also said further dose of said inhibitor is administered within a second period before administration of the antibody construct, wherein another dose of said inhibitor is administered within a third period following administration of said antibody construct, wherein another dose of said inhibitor is administered following administration of said antibody construct within a period from 1 day to 6 days following a first administration of a dose of said antibody construct.
   (xxiv) The method of treating cancer with an antibody construct as defined above, particularly with a cancer immunotherapy, more particularly of PSMA+ target cells, such as prostate cancer, according to any one of embodiments (i) to (xxiii), wherein said method comprises the steps:
[0638] (a) Administering an inhibitor/antagonist of TNF-alpha/TNF-alpha-Receptor reducing TNF-alpha/TNF-alpha-Receptor signaling as defined in any of the foregoing sections,
[0639] (b) Administering an antibody construct that binds PSMA on a target cell and CD3 on a T cell,
   wherein said method comprises the prevention, prophylaxis, amelioration, reduction and/or alleviation of adverse events associated with immunotherapy, particularly of cancer immunotherapy, more particularly of CRS or TLS in a patient as defined in the preceding embodiment, particularly a patient who is at risk of developing CRS or TLS, wherein a first dose, optionally also at least one further dose, of said inhibitor is administered before administration of said antibody construct, and wherein at least one further dose of said inhibitor is administered following administration of said antibody construct, wherein the first dose of said inhibitor is administered within a first period before administration of the antibody construct, wherein optionally also said further dose of said inhibitor is administered within a second period before administration of the antibody construct, wherein another dose of said inhibitor is administered within a third period following administration of said antibody construct, wherein another dose of said inhibitor is administered following administration of said antibody construct within a period from 1 day to 5 days following a first administration of a dose of said antibody construct.
   (xxv) The method of treating cancer with an antibody construct as defined above, particularly with a cancer immunotherapy, more particularly of PSMA+ target cells, such as prostate cancer, according to any one of embodiments (i) to (xxiv), wherein said method comprises the steps:
[0640] (a) Administering an inhibitor/antagonist of TNF-alpha/TNF-alpha-Receptor reducing TNF-alpha/TNF-alpha-Receptor signaling as defined in any of the foregoing sections,
[0641] (b) Administering an antibody construct that binds PSMA on a target cell and CD3 on a T cell,
   wherein said method comprises the prevention, prophylaxis, amelioration, reduction and/or alleviation of adverse events associated with immunotherapy, particularly of cancer immunotherapy, more particularly of CRS or TLS in a patient as defined in the preceding embodiment, particularly a patient who is at risk of developing CRS or TLS, wherein a first dose, optionally also at least one further dose, of said inhibitor is administered before administration of said antibody construct, and wherein at least one further dose of said inhibitor is administered following administration of said antibody construct, wherein the first dose of said inhibitor is administered within a first period before administration of the antibody construct, wherein optionally also said further dose of said inhibitor is administered within a second period before administration of the antibody construct, wherein another dose of said inhibitor is administered within a third period following administration of said antibody construct, wherein another dose of said inhibitor is administered following administration of said antibody construct within a period from 1 day to 4 days following a first administration of a dose of said antibody construct.
   (xxvi) The method of treating cancer with an antibody construct as defined above, particularly with a cancer immunotherapy, more particularly of PSMA+ target cells, such as prostate cancer, according to any one of embodiments (i) to (xxv), wherein said method comprises the steps:
[0642] (a) Administering an inhibitor/antagonist of TNF-alpha/TNF-alpha-Receptor reducing TNF-alpha/TNF-alpha-Receptor signaling as defined in any of the foregoing sections,
[0643] (b) Administering an antibody construct that binds PSMA on a target cell and CD3 on a T cell,
   wherein said method comprises the prevention, prophylaxis, amelioration, reduction and/or alleviation of adverse events associated with immunotherapy, particularly of cancer immunotherapy, more particularly of CRS or TLS in a patient as defined in the preceding embodiment, particularly a patient who is at risk of developing CRS or TLS, wherein a first dose, optionally also at least one further dose, of said inhibitor is administered before administration of said antibody construct, and wherein at least one further dose of said inhibitor is administered following administration of said antibody construct, wherein the first dose of said inhibitor is administered within a first period before administration of the antibody construct, wherein optionally also said further dose of said inhibitor is administered within a second period before administration of the antibody construct, wherein another dose of said inhibitor is administered within a third period following administration of said antibody construct, wherein another dose of said inhibitor is administered following administration of said antibody construct within a period from 1 day to 3 days following a first administration of a dose of said antibody construct.
   (xxvii) The method of treating cancer with an antibody construct as defined above, particularly with a cancer immunotherapy, more particularly of PSMA+ target cells, such as prostate cancer, according to any one of embodiments (i) to (xxvi), wherein said method comprises the steps:
[0644] (a) Administering an inhibitor/antagonist of TNF-alpha/TNF-alpha-Receptor reducing TNF-alpha/TNF-alpha-Receptor signaling as defined in any of the foregoing sections,
[0645] (b) Administering an antibody construct that binds PSMA on a target cell and CD3 on a T cell,
   wherein said method comprises the prevention, prophylaxis, amelioration, reduction and/or alleviation of adverse events associated with immunotherapy, particularly of cancer immunotherapy, more particularly of CRS or TLS in a patient as defined in the preceding embodiment, particularly a patient who is at risk of developing CRS or TLS, wherein a first dose, optionally also at least one further dose, of said inhibitor is administered before administration of said antibody construct, and wherein at least one further dose of said inhibitor is administered following administration of said antibody construct, wherein the first dose of said inhibitor is administered within a first period before administration of the antibody construct, wherein optionally also said further dose of said inhibitor is administered within a second period before administration of the antibody construct, wherein another dose of said inhibitor is administered within a third period following administration of said antibody construct, wherein another dose of said inhibitor is administered following administration of said antibody construct within a period from 1 day to 2 days following a first administration of a dose of said antibody construct.
   (xxviii) The method of treating cancer with an antibody construct as defined above, particularly with a cancer immunotherapy, more particularly of PSMA+ target cells, such as prostate cancer, according to any one of embodiments (i) to (xxvii), wherein the domain of the antibody construct used in accordance with the present invention that binds to PSMA comprises a VL region comprising CDR-L1, CDR-L2 and CDR-L3, wherein CDR-L1 is as depicted in SEQ ID NO:314, CDR-L2 is as depicted in SEQ ID NO: 315, and CDR-L3 is as depicted in SEQ ID NO: 316.
   (xxix) The method of treating cancer with an antibody construct as defined above, particularly with a cancer immunotherapy, more particularly of PSMA+ target cells, such as prostate cancer, according to any one of embodiments (i) to (xxviii), wherein the domain which binds to PSMA comprises a VH region comprising CDR-H1, CDR-H2 and CDR-H3 as disclosed in any of the embodiments of Sub-Aspect B-4.
   (xxx) The method of treating cancer with an antibody construct as defined above, particularly with a cancer immunotherapy, more particularly of PSMA+ target cells, such as prostate cancer, according to any one of embodiments (i) to (xxviii), wherein the domain which binds to PSMA comprises a VL region comprising CDR-L1, CDR-L2 and CDR-L3 and a VH region comprising CDR-H1, CDR-H2 and CDR-H3 as disclosed in any of the embodiments of Sub-Aspect B-4.
   (xxxi) The method of treating cancer with an antibody construct as defined above, particularly with a cancer immunotherapy, more particularly of PSMA+ target cells, such as prostate cancer, according to any one of embodiments (i) to (xxx), wherein the domain which binds to PSMA comprises a VL region as disclosed in any of the embodiments of Sub-Aspect B-4.
   (xxxii) The method of treating cancer with an antibody construct as defined above, particularly with a cancer immunotherapy, more particularly of PSMA+ target cells, such as prostate cancer, according to any one of embodiments (i) to (xxxi), wherein the domain which binds to PSMA comprises a VH region as disclosed in any of the embodiments of Sub-Aspect B-4.
   (xxxiii) The method of treating cancer with an antibody construct as defined above, particularly with a cancer immunotherapy, more particularly of PSMA+ target cells, such as prostate cancer, according to any one of embodiments (i) to (xxxii), wherein the domain which binds to PSMA comprising a VL region and a VH region consisting as disclosed in any of the embodiments of Sub-Aspect B-4.
   (xxxiv) The method of treating cancer with an antibody construct as defined above, particularly with a cancer immunotherapy, more particularly of PSMA+ target cells, such as prostate cancer, according to any one of embodiments (i) to (xxxiii), wherein a domain which binds to PSMA comprising a VL region and a VH region as disclosed in any of the embodiments of Sub-Aspect B-4.
   (xxxv) The method of treating cancer with an antibody construct as defined above, particularly with a cancer immunotherapy, more particularly of PSMA+ target cells, such as prostate cancer, according to any one of embodiments (i) to (xxxiv), wherein a domain which binds to PSMA competes for binding to an epitope of PSMA with an antibody construct that binds to PSMA, wherein said competing antibody construct that binds to PSMA may have VL and/or VH regions that differ in their amino acid sequence(s) from the said antibody constructs as defined in the preceding embodiments, when both, the competing antibody constructs and the antibody constructs as defined in the preceding embodiments are co-incubated in a competition assay with target cells that express PSMA, wherein both, competition antibody construct and antibody constructs as defined in the preceding embodiments are used at equimolar concentrations in such competition assays, wherein the competition antibody construct may be labelled and the antibody constructs as defined in the preceding embodiments may be unlabeled or differently labelled to permit a quantification to be able to distinguish the number of competition antibody construct bound to the target antigen at the end of the competition assay method, and/or wherein the amount/number of competition antibody construct that binds under such circumstances to the target is at least 50%, at least 60%, at least 70%, at least 80%, at least 90%, preferably at least 95% of all antibody constructs selectively binding to the target antigen, and/or wherein the competition antibody construct may comprise one or more, e.g. at least 2, 3, 4, 5, 6, 7, 8, 9, 10, 11, 12, 13, 14, 15, 16, 17, 18, 19, 20 or even more amino acid residues that are different from the antibody constructs as defined in the preceding embodiments.
   (xxxvi) The method of treating cancer with an antibody construct as defined above, particularly with a cancer immunotherapy, more particularly of PSMA+ target cells, such as prostate cancer, according to any one of embodiments (i) to (xxxv), wherein the competition antibody constructs have at least 1, 2, 3, 4, 5, 6, 7, 8, 9, 10, or more amino acid residues that are different from the herein described antibody constructs that are characterized by a domain which binds to PSMA comprising a VL region and a VH region consisting a VL region and a VH region as disclosed in any of the embodiments of Sub-Aspect B-4, or with an antibody construct having a domain which binds to PSMA comprises a VL region comprising CDR-L1, CDR-L2 and CDR-L3 and a VH region comprising CDR-H1, CDR-H2 and CDR-H3 as disclosed in any of the embodiments of Sub-Aspect B-4.
   (xxxvii) The method of treating cancer with an antibody construct as defined above, particularly with a cancer immunotherapy, more particularly of PSMA+ target cells according to any one of embodiments (i) to (xxxvi), further comprising the prevention, prophylaxis, or reduction of adverse events associated with immunotherapy, particularly cancer immunotherapy, more particularly prostate cancer, wherein an antibody construct is administered that comprises at least one domain (also referred to as “first domain”) which binds to PSMA on the surface of a target cell, and at least one other domain (also referred to as “second domain”) which binds to CD3, preferably human CD3, on the surface of a T cell, according to any one of embodiments (i) to (xvi) of general Aspect A) and as defined in Sub-Aspect B-4.
   (xxxviii) The method of treating cancer with an antibody construct as defined above, particularly with a cancer immunotherapy, more particularly of PSMA+ target cells according to any one of embodiments (i) to (xxxvii), further comprising the prevention, prophylaxis, or reduction of adverse events associated with immunotherapy, particularly cancer immunotherapy, more particularly prostate cancer, wherein an antibody construct is administered that comprises at least one domain which binds to PSMA on the surface of a target cell, and at least one other domain which binds to CD3, preferably human CD3, on the surface of a T cell, according to any one of embodiments (i) to (xvi) of general Aspect A) and as further defined in Sub-Aspect B-4, wherein said antibody construct binds to an epitope that is selectively bound by an antibody/antibody construct that has the VH chain and/or VL chain respectively, that are disclosed in WO2010052014, particularly in the sequence listing, which is hereby incorporated by reference.
   (xxxix) Further, the present invention relates to the method of treating cancer with an antibody construct as defined above, particularly with a cancer immunotherapy, more particularly of PSMA+ target cells according to any one of embodiments (i) to (xxxviii), further comprising the prevention, prophylaxis, or reduction of adverse events associated with immunotherapy, particularly cancer immunotherapy, more particularly prostate cancer, wherein an antibody construct is administered that comprises at least one domain which binds to PSMA on the surface of a target cell, and at least one other domain which binds to CD3, preferably human CD3, on the surface of a T cell, according to any one of embodiments (i) to (xvi) of general Aspect A) and as further defined in embodiments (i) to (iii) of Sub-Aspect B-4, wherein the domain which binds to PSMA comprises a VL region comprising CDR-L1, CDR-L2 and CDR-L3, as disclosed in any of the embodiments of Sub-Aspect B-4.
   (xl) Further, the present invention relates to The method of treating cancer with an antibody construct as defined above, particularly with a cancer immunotherapy, more particularly of PSMA+ target cells according to any one of embodiments (i) to (xxxix), further comprising the prevention, prophylaxis, or reduction of adverse events associated with immunotherapy, particularly cancer immunotherapy, more particularly more particularly prostate cancer, wherein an antibody construct is administered that comprises at least one domain which binds to PSMA on the surface of a target cell, and at least one other domain which binds to CD3, preferably human CD3, on the surface of a T cell, according to any one of embodiments (i) to (xvi) of general Aspect A) and as further defined in embodiments (i) to (iv) of Sub-Aspect B-4, wherein the domain which binds to PSMA comprises a VH region comprising CDR-H1, CDR-1-12 and CDR-H3 as disclosed in any of the embodiments of Sub-Aspect B-4.
   (xli) Further, the present invention relates to a method of treating cancer with an antibody construct as defined above, particularly with a cancer immunotherapy, more particularly of PSMA+ target cells according to any one of embodiments (i) to (xl), further comprising the prevention, prophylaxis, or reduction of adverse events associated with immunotherapy, particularly cancer immunotherapy, more particularly more particularly prostate cancer, wherein an antibody construct is administered that comprises at least one domain which binds to PSMA on the surface of a target cell, and at least one other domain which binds to CD3, preferably human CD3, on the surface of a T cell, according to any one of embodiments (i) to (xvi) of general Aspect A) and as further defined in embodiments (i) to (iv) of Sub-Aspect B-4, wherein the domain which binds to PSMA comprises a VL region comprising CDR-L1, CDR-L2 and CDR-L3 and a VH region comprising CDR-H1, CDR-H2 and CDR-H3 as disclosed in any of the embodiments of Sub-Aspect B-4.
   (xlii) Further, the present invention relates to The method of treating cancer with an antibody construct as defined above, particularly with a cancer immunotherapy, more particularly of PSMA+ target cells according to any one of embodiments (i) to (xli), further comprising the prevention, prophylaxis, or reduction of adverse events associated with immunotherapy, particularly cancer immunotherapy, more particularly prostate cancer, wherein an antibody construct is administered that comprises at least one domain which binds to PSMA on the surface of a target cell, and at least one other domain which binds to CD3, preferably human CD3, on the surface of a T cell, according to any one of embodiments (i) to (xvi) of general Aspect A) and as further defined in embodiments (i) to (iv) of Sub-Aspect B-4, wherein the domain which binds to PSMA comprises a VL region as disclosed in any of the embodiments of Sub-Aspect B-4.
   (xliii) Further, the present invention relates to The method of treating cancer with an antibody construct as defined above, particularly with a cancer immunotherapy, more particularly of PSMA+ target cells according to any one of embodiments (i) to (xlii), further comprising the prevention, prophylaxis, or reduction of adverse events associated with immunotherapy, particularly cancer immunotherapy, more particularly prostate cancer, wherein an antibody construct is administered that comprises at least one domain which binds to PSMA on the surface of a target cell, and at least one other domain which binds to CD3, preferably human CD3, on the surface of a T cell, according to any one of embodiments (i) to (xvi) of general Aspect A) and as further defined in embodiments (i) to (iv) of Sub-Aspect B-4, wherein the domain which binds to PSMA comprises a VH region as disclosed in any of the embodiments of Sub-Aspect B-4.
   (xliv) Further, the present invention relates to The method of treating cancer with an antibody construct as defined above, particularly with a cancer immunotherapy, more particularly of PSMA+ target cells according to any one of embodiments (i) to (xliii), further comprising the prevention, prophylaxis, or reduction of adverse events associated with immunotherapy, particularly cancer immunotherapy, more particularly prostate cancer, wherein an antibody construct is administered that comprises at least one domain which binds to PSMA on the surface of a target cell, and at least one other domain which binds to CD3, preferably human CD3, on the surface of a T cell, according to any one of embodiments (i) to (xvi) of general Aspect A) and as further defined in embodiments (i) to (iv) of Sub-Aspect B-4, wherein the domain which binds to PSMA comprises a VL region and a VH region as disclosed in any of the embodiments of Sub-Aspect B-4.
   (xlv) Further, the present invention relates to a method of treating cancer with an antibody construct as defined above, particularly with a cancer immunotherapy, more particularly of PSMA+ target cells according to any one of embodiments (i) to (xliv), further comprising the prevention, prophylaxis, or reduction of adverse events associated with immunotherapy, particularly cancer immunotherapy, more particularly prostate cancer, wherein an antibody construct is administered that comprises at least one domain which binds to PSMA on the surface of a target cell, and at least one other domain which binds to CD3, preferably human CD3, on the surface of a T cell, according to any one of embodiments (i) to (xvi) of general Aspect A) and as further defined in embodiments (i) to (iv) of Sub-Aspect B-4, wherein the first domain which binds to PSMA competes for binding to PSMA with an antibody construct in accordance with the present invention that is characterized by a domain which binds to PSMA comprising a VL region and a VH region as disclosed in any of the embodiments of Sub-Aspect B-4, or with an antibody construct having a domain which binds to PSMA comprises a VL region comprising CDR-L1, CDR-L2 and CDR-L3 and a VH region comprising CDR-H1, CDR-H2 and CDR-H3 as disclosed in any of the embodiments of Sub-Aspect B-4.
   (xlvi) Further, the present invention relates to a method of treating cancer with an antibody construct as defined above, particularly with a cancer immunotherapy, more particularly of PSMA+ target cells according to any one of embodiments (i) to (xlv), wherein the adverse event associated with immunotherapy is increased cytokine release of TNF, IL-1, MCP-1, and/or IL-6, particularly wherein the adverse event is CRS or TLS, wherein the adverse events may also include a neurological reaction, selected from the group comprising confusion, ataxia, disorientation, dysphasia, aphasia, speech impairment, cerebellar symptoms, tremor, apraxia, seizure, grand mal convulsion, palsy, and balance disorder.
   (xlvii) Further, the present invention relates to a method of treating cancer with an antibody construct as defined above, particularly with a cancer immunotherapy, more particularly of PSMA+ target cells according to any one of embodiments (i) to (xlvi), wherein the second domain of said antibody construct binds to CD3, preferably human CD3, epsilon and to Callithrix jacchus or Saimiri sciureus CD3 epsilon.
   (xlviii) Further, the present invention relates to a method of treating cancer with an antibody construct as defined above, particularly with a cancer immunotherapy, more particularly of PSMA+ target cells according to any one of embodiments (i) to (xlvii), wherein
[0646] (a) the antibody construct is a single chain antibody construct,
[0647] (b) the first domain is in the format of an scFv,
[0648] (c) the second domain is in the format of an scFv,
[0649] (d) the first and the second domain are connected via a linker, and/or
[0650] (e) the antibody construct comprises a domain providing an extended serum half-life.
   (xlix) Further, the present invention relates to a method of treating cancer with an antibody construct as defined above, particularly with a cancer immunotherapy, more particularly of PSMA+ target cells according to any one of embodiments (i) to (xlviii), wherein the inhibitor/antagonist of TNF/TNFR that reduces TNF/TNFR signaling is selected from the group comprising small molecules, biological molecules, antibodies and derivatives thereof, aptamers, and the like.
   (l) Further, the present invention relates to a method of treating cancer with an antibody construct as defined above, particularly with a cancer immunotherapy, more particularly of PSMA+ target cells according to any one of embodiments (i) to (xlix), wherein the inhibitor/antagonist of TNF/TNFR that reduces TNF/TNFR signaling is selected from the group of TNF inhibitors comprising etanercept, infliximab, adalimumab, certolizumab Pergol, and golimumab, particularly etanercept.
   (li) Further, the present invention relates to a method of treating cancer with an antibody construct as defined above, particularly with a cancer immunotherapy, more particularly of PSMA+ target cells according to any one of embodiments (i) to (l), for administration to a patient at risk of developing adverse events or having an intolerance to at least one of a group comprising corticosteroids, IL-6-inhibitors, IL-6R-inhibitors, and/or TNF/TNFR inhibitors different from an inhibitor/antagonist of TNF/TNFR that reduces TNF/TNFR signaling according to any of the preceding embodiments.
   (lii) Further, the present invention relates to a method of treating cancer with an antibody construct as defined above, particularly with a cancer immunotherapy, more particularly of PSMA+ target cells according to any one of embodiments (i) to (li), for administration to a patient at risk of developing adverse events or having an intolerance to corticosteroids, wherein the corticosteroid is dexamethasone.
   (liii) Further, the present invention relates to a method of treating cancer with an antibody construct as defined above, particularly with a cancer immunotherapy, more particularly of PSMA+ target cells according to any one of embodiments (i) to (lii), for administration to a patient at risk of developing adverse events or having an intolerance to IL-6-antagonists and/or IL-6R-antagonists, wherein the IL-6-antagonists and/or IL-6R-antagonists are selected from the group comprising tocilizumab, siltuximab, olokizumab, elsilimomab, clazakizumab, sirukumab, particularly tocilizumab, and/or wherein said combination product is for administration to a patient at risk of developing adverse events or having an intolerance to TNF/TNFR inhibitors, wherein the TNF/TNFR inhibitor is selected from the group comprising infliximab, adalimumab, certolizumab Pergol, and/or golimumab.
   (liv) Further, the present invention relates to a method of treating cancer with an antibody construct as defined above, particularly with a cancer immunotherapy, more particularly of PSMA+ target cells according to any one of embodiments (i) to (liii), further comprising administering at least one corticosteroid, particularly wherein said corticostoid is dexamethasone.
   (1v) Further, the present invention relates to a method of treating cancer with an antibody construct as defined above, particularly with a cancer immunotherapy, more particularly of PSMA+ target cells according to any one of embodiments (i) to (liii), further comprising administering an IL-6R-antagonist, wherein said IL-6R-antagonist is tocilizumab.
   (lvi) Further, the present invention relates to a method of treating cancer with an antibody construct as defined above, particularly with a cancer immunotherapy, more particularly of PSMA+ target cells according to any one of embodiments (i) to (liv), further comprising administering at least one corticosteroid, particularly dexamethasone and/or at least one IL-6 and/or IL-6R-antagonist, particularly tocilizumab, wherein said at least one corticosteroid and/or said IL-6 and/or IL-6R-antagonist is for administration to a patient in need thereof prior to, concomitant with, and/or after administration of said antibody construct.
   Sub-Aspect F-5—Dosing of an TNF/TNFR Inhibitor/Antagonist Together with Antibody Constructs Binding DLL3

[0651] The present invention relates also to a method/a use of an inhibitor/antagonist of TNF/TNFR that reduces TNF/TNFR signaling as defined in any of the foregoing embodiments (i) to (xiv) in general Aspect A for the prevention of adverse events associated with immunotherapy, particularly of cancer immunotherapy, very particularly of CRS, in accordance with any of the methods as defined explicitly in Aspect B, particularly in Sub-Aspect B5, in a patient suffering from a neoplastic disease and who is at risk of CRS as defined in the preceding embodiments, wherein said patient is a person subjected to therapy with an antibody construct comprising a first domain which binds to a target antigen on the surface of a target cell, and a second domain which binds to CD3, preferably human CD3, on the surface of a T cell as defined in any of the foregoing embodiments, wherein a first dose of said inhibitor is administered before administration of a first dose of said antibody construct, and wherein said antibody construct binds DLL3.

(i) A method of treating cancer with an antibody construct as defined above, particularly with a cancer immunotherapy, more particularly of DLL3+ target cells, wherein said method comprises the steps:
[0652] (a) Administering an inhibitor/antagonist of TNF-alpha/TNF-alpha-Receptor reducing TNF-alpha/TNF-alpha-Receptor signaling as defined in any of the foregoing sections,
[0653] (b) Administering an antibody construct that binds DLL3 on a target cell and CD3 on a T cell, wherein a first dose of said inhibitor is administered before administration of a first dose of said antibody construct.
   (ii) The method of treating cancer with an antibody construct as defined above, particularly with a cancer immunotherapy, more particularly of DLL3+ target cells, according to embodiment (i), wherein said method comprises the steps:
[0654] (a) Administering an inhibitor/antagonist of TNF-alpha/TNF-alpha-Receptor reducing TNF-alpha/TNF-alpha-Receptor signaling as defined in any of the foregoing sections,
[0655] (b) Administering an antibody construct that binds DLL3 on a target cell and CD3 on a T cell,
   wherein said method comprises the prevention, prophylaxis, amelioration, reduction and/or alleviation of adverse events associated with immunotherapy, particularly of cancer immunotherapy, more particularly of cytokine release syndrome (CRS) in a patient suffering from a neoplastic disease as defined in the preceding embodiment, particularly a patient who is at risk of developing CRS.
   (iii) The method of treating cancer with an antibody construct as defined above, particularly with a cancer immunotherapy, more particularly of DLL3+ target cells, according to any one of embodiments (i) and (ii), wherein said method comprises the steps:
[0656] (a) Administering an inhibitor/antagonist of TNF-alpha/TNF-alpha-Receptor reducing TNF-alpha/TNF-alpha-Receptor signaling as defined in any of the foregoing sections,
[0657] (b) Administering an antibody construct that binds DLL3 on a target cell and CD3 on a T cell,
   wherein said method comprises the prevention, prophylaxis, amelioration, reduction and/or alleviation of adverse events associated with immunotherapy, particularly of cancer immunotherapy, more particularly of cytokine release syndrome (CRS) or tumor lysis syndrome (TLS) in a patient as defined in the preceding embodiment, particularly a patient who is at risk of developing CRS or TLS, wherein at least one further dose, preferably a second dose, of said inhibitor is administered before administration of said antibody construct.
   (iv) The method of treating cancer with an antibody construct as defined above, particularly with a cancer immunotherapy, more particularly of DLL3+ target cells, according to any one of embodiments (i) to (iii), wherein said method comprises the steps:
[0658] (a) Administering an inhibitor/antagonist of TNF-alpha/TNF-alpha-Receptor reducing TNF-alpha/TNF-alpha-Receptor signaling as defined in any of the foregoing sections,
[0659] (b) Administering an antibody construct that binds DLL3 on a target cell and CD3 on a T cell,
   wherein said method comprises the prevention, prophylaxis, amelioration, reduction and/or alleviation of adverse events associated with immunotherapy, particularly of cancer immunotherapy, more particularly of cytokine release syndrome (CRS) or tumor lysis syndrome (TLS) in a patient as defined in the preceding embodiment, particularly a patient who is at risk of developing CRS or TLS, wherein a first dose, optionally also at least one further dose, of said inhibitor is administered before administration of said antibody construct, and wherein a further dose of said inhibitor is administered following administration of said antibody construct.
   (v) The method of treating cancer with an antibody construct as defined above, particularly with a cancer immunotherapy, more particularly of DLL3+ target cells, according to any one of embodiments (i) to (iv), wherein said method comprises the steps:
[0660] (a) Administering an inhibitor/antagonist of TNF-alpha/TNF-alpha-Receptor reducing TNF-alpha/TNF-alpha-Receptor signaling as defined in any of the foregoing sections,
[0661] (b) Administering an antibody construct that binds DLL3 on a target cell and CD3 on a T cell,
   wherein said method comprises the prevention, prophylaxis, amelioration, reduction and/or alleviation of adverse events associated with immunotherapy, particularly of cancer immunotherapy, more particularly of cytokine release syndrome (CRS) or tumor lysis syndrome (TLS) in a patient as defined in the preceding embodiment, particularly a patient who is at risk of developing CRS or TLS, wherein a first dose, optionally also at least one further dose, of said inhibitor is administered before administration of said antibody construct, and wherein further dose of said inhibitor is administered following administration of said antibody construct, wherein the first dose of said inhibitor is administered within a first period before administration of the antibody construct, wherein optionally also said further dose of said inhibitor is administered within a second period before administration of the antibody construct, wherein another dose of said inhibitor is administered within a third period following administration of said antibody construct.
   (vi) The method of treating cancer with an antibody construct as defined above, particularly with a cancer immunotherapy, more particularly of DLL3+ target cells, according to any one of embodiments (i) to (v), wherein said method comprises the steps:
[0662] (a) Administering an inhibitor/antagonist of TNF-alpha/TNF-alpha-Receptor reducing TNF-alpha/TNF-alpha-Receptor signaling as defined in any of the foregoing sections,
[0663] (b) Administering an antibody construct that binds DLL3 on a target cell and CD3 on a T cell,
   wherein said method comprises the prevention, prophylaxis, amelioration, reduction and/or alleviation of adverse events associated with immunotherapy, particularly of cancer immunotherapy, more particularly of cytokine release syndrome (CRS) or tumor lysis syndrome (TLS) in a patient as defined in the preceding embodiment, particularly a patient who is at risk of developing CRS or TLS, wherein a first dose, optionally also at least one further dose, of said inhibitor is administered before administration of said antibody construct, and wherein further dose of said inhibitor is administered following administration of said antibody construct, wherein the first dose of said inhibitor is administered within a first period before administration of the antibody construct, wherein optionally also said further dose of said inhibitor is administered within a second period before administration of the antibody construct, wherein another dose of said inhibitor is administered within a third period following administration of said antibody construct, wherein the first dose of said inhibitor is administered within a first period before administration of the antibody construct, said period ranging from 30 minutes to 7 days prior to administration of the antibody construct.
   (vii) The method of treating cancer with an antibody construct as defined above, particularly with a cancer immunotherapy, more particularly of DLL3+ target cells, according to any one of embodiments (i) to (vi), wherein said method comprises the steps:
[0664] (a) Administering an inhibitor/antagonist of TNF-alpha/TNF-alpha-Receptor reducing TNF-alpha/TNF-alpha-Receptor signaling as defined in any of the foregoing sections,
[0665] (b) Administering an antibody construct that binds DLL3 on a target cell and CD3 on a T cell,
   wherein said method comprises the prevention, prophylaxis, amelioration, reduction and/or alleviation of adverse events associated with immunotherapy, particularly of cancer immunotherapy, more particularly of cytokine release syndrome (CRS) or tumor lysis syndrome (TLS) in a patient as defined in the preceding embodiment, particularly a patient who is at risk of developing CRS or TLS, wherein a first dose, optionally also at least one further dose, of said inhibitor is administered before administration of said antibody construct, and wherein further dose of said inhibitor is administered following administration of said antibody construct, wherein the first dose of said inhibitor is administered within a first period before administration of the antibody construct, wherein optionally also said further dose of said inhibitor is administered within a second period before administration of the antibody construct, wherein another dose of said inhibitor is administered within a third period following administration of said antibody construct, wherein the first dose of said inhibitor is administered within a first period before administration of the antibody construct, said period ranging from 30 minutes to 6 days prior to administration of the antibody construct.
   (viii) The method of treating cancer with an antibody construct as defined above, particularly with a cancer immunotherapy, more particularly of DLL3+ target cells, according to any one of embodiments (i) to (vii), wherein said method comprises the steps:
[0666] (a) Administering an inhibitor/antagonist of TNF-alpha/TNF-alpha-Receptor reducing TNF-alpha/TNF-alpha-Receptor signaling as defined in any of the foregoing sections,
[0667] (b) Administering an antibody construct that binds DLL3 on a target cell and CD3 on a T cell,
   wherein said method comprises the prevention, prophylaxis, amelioration, reduction and/or alleviation of adverse events associated with immunotherapy, particularly of cancer immunotherapy, more particularly of cytokine release syndrome (CRS) or tumor lysis syndrome (TLS) in a patient as defined in the preceding embodiment, particularly a patient who is at risk of developing CRS or TLS, wherein a first dose, optionally also at least one further dose, of said inhibitor is administered before administration of said antibody construct, and wherein further dose of said inhibitor is administered following administration of said antibody construct, wherein the first dose of said inhibitor is administered within a first period before administration of the antibody construct, wherein optionally also said further dose of said inhibitor is administered within a second period before administration of the antibody construct, wherein another dose of said inhibitor is administered within a third period following administration of said antibody construct, wherein the first dose of said inhibitor is administered within a first period before administration of the antibody construct, said period ranging from 30 minutes to 5 days prior to administration of the antibody construct.
   (ix) The method of treating cancer with an antibody construct as defined above, particularly with a cancer immunotherapy, more particularly of DLL3+ target cells, according to any one of embodiments (i) to (viii), wherein said method comprises the steps:
[0668] (a) Administering an inhibitor/antagonist of TNF-alpha/TNF-alpha-Receptor reducing TNF-alpha/TNF-alpha-Receptor signaling as defined in any of the foregoing sections,
[0669] (b) Administering an antibody construct that binds DLL3 on a target cell and CD3 on a T cell,
   wherein said method comprises the prevention, prophylaxis, amelioration, reduction and/or alleviation of adverse events associated with immunotherapy, particularly of cancer immunotherapy, more particularly of cytokine release syndrome (CRS) or tumor lysis syndrome (TLS) in a patient as defined in the preceding embodiment, particularly a patient who is at risk of developing CRS or TLS, wherein a first dose, optionally also at least one further dose, of said inhibitor is administered before administration of said antibody construct, and wherein further dose of said inhibitor is administered following administration of said antibody construct, wherein the first dose of said inhibitor is administered within a first period before administration of the antibody construct, wherein optionally also said further dose of said inhibitor is administered within a second period before administration of the antibody construct, wherein another dose of said inhibitor is administered within a third period following administration of said antibody construct, wherein the first dose of said inhibitor is administered within a first period before administration of the antibody construct, said period ranging from 30 minutes to 4 days prior to administration of the antibody construct.
   (x) The method of treating cancer with an antibody construct as defined above, particularly with a cancer immunotherapy, more particularly of DLL3+ target cells, according to any one of embodiments (i) to (ix), wherein said method comprises the steps:
[0670] (a) Administering an inhibitor/antagonist of TNF-alpha/TNF-alpha-Receptor reducing TNF-alpha/TNF-alpha-Receptor signaling as defined in any of the foregoing sections,
[0671] (b) Administering an antibody construct that binds DLL3 on a target cell and CD3 on a T cell,
   wherein said method comprises the prevention, prophylaxis, amelioration, reduction and/or alleviation of adverse events associated with immunotherapy, particularly of cancer immunotherapy, more particularly of cytokine release syndrome (CRS) or tumor lysis syndrome (TLS) in a patient as defined in the preceding embodiment, particularly a patient who is at risk of developing CRS or TLS, wherein a first dose, optionally also at least one further dose, of said inhibitor is administered before administration of said antibody construct, and wherein further dose of said inhibitor is administered following administration of said antibody construct, wherein the first dose of said inhibitor is administered within a first period before administration of the antibody construct, wherein optionally also said further dose of said inhibitor is administered within a second period before administration of the antibody construct, wherein another dose of said inhibitor is administered within a third period following administration of said antibody construct, wherein the first dose of said inhibitor is administered within a first period before administration of the antibody construct, said period ranging from 30 minutes to 3 days prior to administration of the antibody construct.
   (xi) The method of treating cancer with an antibody construct as defined above, particularly with a cancer immunotherapy, more particularly of DLL3+ target cells, according to any one of embodiments (i) to (x), wherein said method comprises the steps:
[0672] (a) Administering an inhibitor/antagonist of TNF-alpha/TNF-alpha-Receptor reducing TNF-alpha/TNF-alpha-Receptor signaling as defined in any of the foregoing sections,
[0673] (b) Administering an antibody construct that binds DLL3 on a target cell and CD3 on a T cell,
   wherein said method comprises the prevention, prophylaxis, amelioration, reduction and/or alleviation of adverse events associated with immunotherapy, particularly of cancer immunotherapy, more particularly of cytokine release syndrome (CRS) or tumor lysis syndrome (TLS) in a patient as defined in the preceding embodiment, particularly a patient who is at risk of developing CRS or TLS, wherein a first dose, optionally also at least one further dose, of said inhibitor is administered before administration of said antibody construct, and wherein further dose of said inhibitor is administered following administration of said antibody construct, wherein the first dose of said inhibitor is administered within a first period before administration of the antibody construct, wherein optionally also said further dose of said inhibitor is administered within a second period before administration of the antibody construct, wherein another dose of said inhibitor is administered within a third period following administration of said antibody construct, wherein the first dose of said inhibitor is administered within a first period before administration of the antibody construct, said period ranging from 30 minutes to 2 days prior to administration of the antibody construct.
   (xii) The method of treating cancer with an antibody construct as defined above, particularly with a cancer immunotherapy, more particularly of DLL3+ target cells, according to any one of embodiments (i) to (xi), wherein said method comprises the steps:
[0674] (a) Administering an inhibitor/antagonist of TNF-alpha/TNF-alpha-Receptor reducing TNF-alpha/TNF-alpha-Receptor signaling as defined in any of the foregoing sections,
[0675] (b) Administering an antibody construct that binds DLL3on a target cell and CD3 on a T cell,
   wherein said method comprises the prevention, prophylaxis, amelioration, reduction and/or alleviation of adverse events associated with immunotherapy, particularly of cancer immunotherapy, more particularly of cytokine release syndrome (CRS) or tumor lysis syndrome (TLS) in a patient as defined in the preceding embodiment, particularly a patient who is at risk of developing CRS or TLS, wherein a first dose, optionally also at least one further dose, of said inhibitor is administered before administration of said antibody construct, and wherein further dose of said inhibitor is administered following administration of said antibody construct, wherein the first dose of said inhibitor is administered within a first period before administration of the antibody construct, wherein optionally also said further dose of said inhibitor is administered within a second period before administration of the antibody construct, wherein another dose of said inhibitor is administered within a third period following administration of said antibody construct, wherein the first dose of said inhibitor is administered within a first period before administration of the antibody construct, said period ranging from 30 minutes to 1 day prior to administration of the antibody construct.
   (xiii) The method of treating cancer with an antibody construct as defined above, particularly with a cancer immunotherapy, more particularly of DLL3+ target cells, according to any one of embodiments (i) to (xii), wherein said method comprises the steps:
[0676] (a) Administering an inhibitor/antagonist of TNF-alpha/TNF-alpha-Receptor reducing TNF-alpha/TNF-alpha-Receptor signaling as defined in any of the foregoing sections,
[0677] (b) Administering an antibody construct that binds DLL3 on a target cell and CD3 on a T cell,
   wherein said method comprises the prevention, prophylaxis, amelioration, reduction and/or alleviation of adverse events associated with immunotherapy, particularly of cancer immunotherapy, more particularly of cytokine release syndrome (CRS) or tumor lysis syndrome (TLS) in a patient as defined in the preceding embodiment, particularly a patient who is at risk of developing CRS or TLS, wherein a first dose, optionally also at least one further dose, of said inhibitor is administered before administration of said antibody construct, and wherein further dose of said inhibitor is administered following administration of said antibody construct, wherein the first dose of said inhibitor is administered within a first period before administration of the antibody construct, wherein optionally also said further dose of said inhibitor is administered within a second period before administration of the antibody construct, wherein another dose of said inhibitor is administered within a third period following administration of said antibody construct, wherein the first dose of said inhibitor is administered within a first period before administration of the antibody construct, said period ranging from 60 minutes to 1 day prior to administration of the antibody construct.
   (xiv) The method of treating cancer with an antibody construct as defined above, particularly with a cancer immunotherapy, more particularly of DLL3+ target cells, according to any one of embodiments (i) to (xiii), wherein said method comprises the steps:
[0678] (a) Administering an inhibitor/antagonist of TNF-alpha/TNF-alpha-Receptor reducing TNF-alpha/TNF-alpha-Receptor signaling as defined in any of the foregoing sections,
[0679] (b) Administering an antibody construct that binds DLL3 on a target cell and CD3 on a T cell,
   wherein said method comprises the prevention, prophylaxis, amelioration, reduction and/or alleviation of adverse events associated with immunotherapy, particularly of cancer immunotherapy, more particularly of cytokine release syndrome (CRS) or tumor lysis syndrome (TLS) in a patient as defined in the preceding embodiment, particularly a patient who is at risk of developing CRS or TLS, wherein a first dose, optionally also at least one further dose, of said inhibitor is administered before administration of said antibody construct, and wherein further dose of said inhibitor is administered following administration of said antibody construct, wherein the first dose of said inhibitor is administered within a first period before administration of the antibody construct, wherein optionally also said further dose of said inhibitor is administered within a second period before administration of the antibody construct, wherein another dose of said inhibitor is administered within a third period following administration of said antibody construct, wherein the further dose of said inhibitor is administered within a second period, for example within a second period before administration of the antibody construct, wherein said period is shorter than the first period of administration of the inhibitor.
   (xv) The method of treating cancer with an antibody construct as defined above, according to any one of embodiments (i) to (xvi), wherein said method comprises the steps:
[0680] (a) Administering an inhibitor/antagonist of TNF-alpha/TNF-alpha-Receptor reducing TNF-alpha/TNF-alpha-Receptor signaling as defined in any of the foregoing sections,
[0681] (b) Administering an antibody construct that binds DLL3 on a target cell and CD3 on a T cell,
   wherein said method comprises the prevention, prophylaxis, amelioration, reduction and/or alleviation of adverse events associated with immunotherapy, particularly of cancer immunotherapy, more particularly of cytokine release syndrome (CRS) or tumor lysis syndrome (TLS) in a patient as defined in the preceding embodiment, particularly a patient who is at risk of developing CRS or TLS, wherein a first dose, optionally also at least one further dose, of said inhibitor is administered before administration of said antibody construct, and wherein further dose of said inhibitor is administered following administration of said antibody construct, wherein the first dose of said inhibitor is administered within a first period before administration of the antibody construct, wherein optionally also said further dose of said inhibitor is administered within a second period before administration of the antibody construct, wherein another dose of said inhibitor is administered within a third period following administration of said antibody construct, wherein the further dose of said inhibitor is administered within a second period ranging from 30 minutes to 5 days prior to administration of the antibody construct.
   (xvi) The method of treating cancer with an antibody construct as defined above, according to any one of embodiments (i) to (xv), wherein said method comprises the steps:
[0682] (a) Administering an inhibitor/antagonist of TNF-alpha/TNF-alpha-Receptor reducing TNF-alpha/TNF-alpha-Receptor signaling as defined in any of the foregoing sections,
[0683] (b) Administering an antibody construct that binds DLL3 on a target cell and CD3 on a T cell,
   wherein said method comprises the prevention, prophylaxis, amelioration, reduction and/or alleviation of adverse events associated with immunotherapy, particularly of cancer immunotherapy, more particularly of cytokine release syndrome (CRS) or tumor lysis syndrome (TLS) in a patient as defined in the preceding embodiment, particularly a patient who is at risk of developing CRS or TLS, wherein a first dose, optionally also at least one further dose, of said inhibitor is administered before administration of said antibody construct, and wherein further dose of said inhibitor is administered following administration of said antibody construct, wherein the first dose of said inhibitor is administered within a first period before administration of the antibody construct, wherein optionally also said further dose of said inhibitor is administered within a second period before administration of the antibody construct, wherein another dose of said inhibitor is administered within a third period following administration of said antibody construct, wherein the further dose of said inhibitor is administered within a period ranging from 30 minutes to 4 days prior to administration of the antibody construct.
   (xvii) The method of treating cancer with an antibody construct as defined above, particularly with a cancer immunotherapy, more particularly of DLL3+ target cells, according to any one of embodiments (i) to (xvi), wherein said method comprises the steps:
[0684] (a) Administering an inhibitor/antagonist of TNF-alpha/TNF-alpha-Receptor reducing TNF-alpha/TNF-alpha-Receptor signaling as defined in any of the foregoing sections,
[0685] (b) Administering an antibody construct that binds DLL3 on a target cell and CD3 on a T cell,
   wherein said method comprises the prevention, prophylaxis, amelioration, reduction and/or alleviation of adverse events associated with immunotherapy, particularly of cancer immunotherapy, more particularly of cytokine release syndrome (CRS) or tumor lysis syndrome (TLS) in a patient as defined in the preceding embodiment, particularly a patient who is at risk of developing CRS or TLS, wherein a first dose, optionally also at least one further dose, of said inhibitor is administered before administration of said antibody construct, and wherein further dose of said inhibitor is administered following administration of said antibody construct, wherein the first dose of said inhibitor is administered within a first period before administration of the antibody construct, wherein optionally also said further dose of said inhibitor is administered within a second period before administration of the antibody construct, wherein another dose of said inhibitor is administered within a third period following administration of said antibody construct, wherein the further dose of said inhibitor is administered within a period ranging from 30 minutes to 3 days prior to administration of the antibody construct.
   (xviii) The method of treating cancer with an antibody construct as defined above, particularly with a cancer immunotherapy, more particularly of DLL3+ target cells, according to any one of embodiments (i) to (xvii), wherein said method comprises the steps:
[0686] (a) Administering an inhibitor/antagonist of TNF-alpha/TNF-alpha-Receptor reducing TNF-alpha/TNF-alpha-Receptor signaling as defined in any of the foregoing sections,
[0687] (b) Administering an antibody construct that binds DLL3 on a target cell and CD3 on a T cell,
   wherein said method comprises the prevention, prophylaxis, amelioration, reduction and/or alleviation of adverse events associated with immunotherapy, particularly of cancer immunotherapy, more particularly of cytokine release syndrome (CRS) or tumor lysis syndrome (TLS) in a patient as defined in the preceding embodiment, particularly a patient who is at risk of developing CRS or TLS, wherein a first dose, optionally also at least one further dose, of said inhibitor is administered before administration of said antibody construct, and wherein further dose of said inhibitor is administered following administration of said antibody construct, wherein the first dose of said inhibitor is administered within a first period before administration of the antibody construct, wherein optionally also said further dose of said inhibitor is administered within a second period before administration of the antibody construct, wherein another dose of said inhibitor is administered within a third period following administration of said antibody construct, wherein the further dose of said inhibitor is administered within a period ranging from 30 minutes to 2 days prior to administration of the antibody construct.
   (xix) The method of treating cancer with an antibody construct as defined above, particularly with a cancer immunotherapy, more particularly of DLL3+ target cells, according to any one of embodiments (i) to (xviii), wherein said method comprises the steps:
[0688] (a) Administering an inhibitor/antagonist of TNF-alpha/TNF-alpha-Receptor reducing TNF-alpha/TNF-alpha-Receptor signaling as defined in any of the foregoing sections,
[0689] (b) Administering an antibody construct that binds DLL3 on a target cell and CD3 on a T cell,
   wherein said method comprises the prevention, prophylaxis, amelioration, reduction and/or alleviation of adverse events associated with immunotherapy, particularly of cancer immunotherapy, more particularly of cytokine release syndrome (CRS) or tumor lysis syndrome (TLS) in a patient as defined in the preceding embodiment, particularly a patient who is at risk of developing CRS or TLS, wherein a first dose, optionally also at least one further dose, of said inhibitor is administered before administration of said antibody construct, and wherein further dose of said inhibitor is administered following administration of said antibody construct, wherein the first dose of said inhibitor is administered within a first period before administration of the antibody construct, wherein optionally also said further dose of said inhibitor is administered within a second period before administration of the antibody construct, wherein another dose of said inhibitor is administered within a third period following administration of said antibody construct, wherein the further dose of said inhibitor is administered within a period ranging from 30 minutes to 1 day prior to administration of the antibody construct.
   (xx) The method of treating cancer with an antibody construct as defined above, particularly with a cancer immunotherapy, more particularly of DLL3+ target cells, according to any one of embodiments (i) to (xix), wherein said method comprises the steps:
[0690] (a) Administering an inhibitor/antagonist of TNF-alpha/TNF-alpha-Receptor reducing TNF-alpha/TNF-alpha-Receptor signaling as defined in any of the foregoing sections,
[0691] (b) Administering an antibody construct that binds DLL3 on a target cell and CD3 on a T cell,
   wherein said method comprises the prevention, prophylaxis, amelioration, reduction and/or alleviation of adverse events associated with immunotherapy, particularly of cancer immunotherapy, more particularly of cytokine release syndrome (CRS) or tumor lysis syndrome (TLS) in a patient as defined in the preceding embodiment, particularly a patient who is at risk of developing CRS or TLS, wherein a first dose, optionally also at least one further dose, of said inhibitor is administered before administration of said antibody construct, and wherein further dose of said inhibitor is administered following administration of said antibody construct, wherein the first dose of said inhibitor is administered within a first period before administration of the antibody construct, wherein optionally also said further dose of said inhibitor is administered within a second period before administration of the antibody construct, wherein another dose of said inhibitor is administered within a third period following administration of said antibody construct, wherein the first dose and at least one further dose of said inhibitor comprise different quantities of inhibitor and/or different quantities of the antibody construct.
   (xxi) The method of treating cancer with an antibody construct as defined above, particularly with a cancer immunotherapy, more particularly of DLL3+ target cells, according to any one of embodiments (i) to (xx), wherein said method comprises the steps:
[0692] (a) Administering an inhibitor/antagonist of TNF-alpha/TNF-alpha-Receptor reducing TNF-alpha/TNF-alpha-Receptor signaling as defined in any of the foregoing sections,
[0693] (b) Administering an antibody construct that binds DLL3 on a target cell and CD3 on a T cell,
   wherein said method comprises the prevention, prophylaxis, amelioration, reduction and/or alleviation of adverse events associated with immunotherapy, particularly of cancer immunotherapy, more particularly of cytokine release syndrome (CRS) or tumor lysis syndrome (TLS) in a patient as defined in the preceding embodiment, particularly a patient who is at risk of developing CRS or TLS, wherein a first dose, optionally also at least one further dose, of said inhibitor is administered before administration of said antibody construct, and wherein further dose of said inhibitor is administered following administration of said antibody construct, wherein the first dose of said inhibitor is administered within a first period before administration of the antibody construct, wherein optionally also said further dose of said inhibitor is administered within a second period before administration of the antibody construct, wherein another dose of said inhibitor is administered within a third period following administration of said antibody construct, wherein the first dose and at least one further dose of said inhibitor comprise identical quantities of inhibitor and/or identical quantities of the antibody construct.
   (xxii) The method of treating cancer with an antibody construct as defined above, particularly with a cancer immunotherapy, more particularly of DLL3+ target cells, according to any one of embodiments (i) to (xxi), wherein said method comprises the steps:
[0694] (a) Administering an inhibitor/antagonist of TNF-alpha/TNF-alpha-Receptor reducing TNF-alpha/TNF-alpha-Receptor signaling as defined in any of the foregoing sections,
[0695] (b) Administering an antibody construct that binds DLL3 on a target cell and CD3 on a T cell,
   wherein said method comprises the prevention, prophylaxis, amelioration, reduction and/or alleviation of adverse events associated with immunotherapy, particularly of cancer immunotherapy, more particularly of cytokine release syndrome (CRS) or tumor lysis syndrome (TLS) in a patient as defined in the preceding embodiment, particularly a patient who is at risk of developing CRS or TLS, wherein a first dose, optionally also at least one further dose, of said inhibitor is administered before administration of said antibody construct, and wherein further dose of said inhibitor is administered following administration of said antibody construct, wherein the first dose of said inhibitor is administered within a first period before administration of the antibody construct, wherein optionally also said further dose of said inhibitor is administered within a second period before administration of the antibody construct, wherein another dose of said inhibitor is administered within a third period following administration of said antibody construct, wherein another dose of said inhibitor is administered following administration of said antibody construct within a period from 1 day to 7 days following a first administration of a dose of said antibody construct.
   (xxiii) The method of treating cancer with an antibody construct as defined above, particularly with a cancer immunotherapy, more particularly of DLL3+ target cells, according to any one of embodiments (i) to (xxii), wherein said method comprises the steps:
[0696] (a) Administering an inhibitor/antagonist of TNF-alpha/TNF-alpha-Receptor reducing TNF-alpha/TNF-alpha-Receptor signaling as defined in any of the foregoing sections,
[0697] (b) Administering an antibody construct that binds DLL3 on a target cell and CD3 on a T cell,
   wherein said method comprises the prevention, prophylaxis, amelioration, reduction and/or alleviation of adverse events associated with immunotherapy, particularly of cancer immunotherapy, more particularly of cytokine release syndrome (CRS) or tumor lysis syndrome (TLS) in a patient as defined in the preceding embodiment, particularly a patient who is at risk of developing CRS or TLS, wherein a first dose, optionally also at least one further dose, of said inhibitor is administered before administration of said antibody construct, and wherein further dose of said inhibitor is administered following administration of said antibody construct, wherein the first dose of said inhibitor is administered within a first period before administration of the antibody construct, wherein optionally also said further dose of said inhibitor is administered within a second period before administration of the antibody construct, wherein another dose of said inhibitor is administered within a third period following administration of said antibody construct, wherein another dose of said inhibitor is administered following administration of said antibody construct within a period from 1 day to 6 days following a first administration of a dose of said antibody construct.
   (xxiv) The method of treating cancer with an antibody construct as defined above, particularly with a cancer immunotherapy, more particularly of DLL3+ target cells, according to any one of embodiments (i) to (xxiii), wherein said method comprises the steps:
[0698] (a) Administering an inhibitor/antagonist of TNF-alpha/TNF-alpha-Receptor reducing TNF-alpha/TNF-alpha-Receptor signaling as defined in any of the foregoing sections,
[0699] (b) Administering an antibody construct that binds DLL3 on a target cell and CD3 on a T cell,
   wherein said method comprises the prevention, prophylaxis, amelioration, reduction and/or alleviation of adverse events associated with immunotherapy, particularly of cancer immunotherapy, more particularly of cytokine release syndrome (CRS) or tumor lysis syndrome (TLS) in a patient as defined in the preceding embodiment, particularly a patient who is at risk of developing CRS or TLS, wherein a first dose, optionally also at least one further dose, of said inhibitor is administered before administration of said antibody construct, and wherein further dose of said inhibitor is administered following administration of said antibody construct, wherein the first dose of said inhibitor is administered within a first period before administration of the antibody construct, wherein optionally also said further dose of said inhibitor is administered within a second period before administration of the antibody construct, wherein another dose of said inhibitor is administered within a third period following administration of said antibody construct, wherein another dose of said inhibitor is administered following administration of said antibody construct within a period from 1 day to 5 days following a first administration of a dose of said antibody construct.
   (xxv) The method of treating cancer with an antibody construct as defined above, particularly with a cancer immunotherapy, more particularly of DLL3+ target cells, according to any one of embodiments (i) to (xxiv), wherein said method comprises the steps:
[0700] (a) Administering an inhibitor/antagonist of TNF-alpha/TNF-alpha-Receptor reducing TNF-alpha/TNF-alpha-Receptor signaling as defined in any of the foregoing sections,
[0701] (b) Administering an antibody construct that binds DLL3 on a target cell and CD3 on a T cell,
   wherein said method comprises the prevention, prophylaxis, amelioration, reduction and/or alleviation of adverse events associated with immunotherapy, particularly of cancer immunotherapy, more particularly of cytokine release syndrome (CRS) or tumor lysis syndrome (TLS) in a patient as defined in the preceding embodiment, particularly a patient who is at risk of developing CRS or TLS, wherein a first dose, optionally also at least one further dose, of said inhibitor is administered before administration of said antibody construct, and wherein further dose of said inhibitor is administered following administration of said antibody construct, wherein the first dose of said inhibitor is administered within a first period before administration of the antibody construct, wherein optionally also said further dose of said inhibitor is administered within a second period before administration of the antibody construct, wherein another dose of said inhibitor is administered within a third period following administration of said antibody construct, wherein another dose of said inhibitor is administered following administration of said antibody construct within a period from 1 day to 4 days following a first administration of a dose of said antibody construct.
   (xxvi) The method of treating cancer with an antibody construct as defined above, particularly with a cancer immunotherapy, more particularly of DLL3+ target cells, according to any one of embodiments (i) to (xxv), wherein said method comprises the steps:
[0702] (a) Administering an inhibitor/antagonist of TNF-alpha/TNF-alpha-Receptor reducing TNF-alpha/TNF-alpha-Receptor signaling as defined in any of the foregoing sections,
[0703] (b) Administering an antibody construct that binds DLL3 on a target cell and CD3 on a T cell,
   wherein said method comprises the prevention, prophylaxis, amelioration, reduction and/or alleviation of adverse events associated with immunotherapy, particularly of cancer immunotherapy, more particularly of cytokine release syndrome (CRS) or tumor lysis syndrome (TLS) in a patient as defined in the preceding embodiment, particularly a patient who is at risk of developing CRS or TLS, wherein a first dose, optionally also at least one further dose, of said inhibitor is administered before administration of said antibody construct, and wherein further dose of said inhibitor is administered following administration of said antibody construct, wherein the first dose of said inhibitor is administered within a first period before administration of the antibody construct, wherein optionally also said further dose of said inhibitor is administered within a second period before administration of the antibody construct, wherein another dose of said inhibitor is administered within a third period following administration of said antibody construct, wherein another dose of said inhibitor is administered following administration of said antibody construct within a period from 1 day to 3 days following a first administration of a dose of said antibody construct.
   (xxvii) The method of treating cancer with an antibody construct as defined above, particularly with a cancer immunotherapy, more particularly of DLL3+ target cells, according to any one of embodiments (i) to (xxvi), wherein said method comprises the steps:
[0704] (a) Administering an inhibitor/antagonist of TNF-alpha/TNF-alpha-Receptor reducing TNF-alpha/TNF-alpha-Receptor signaling as defined in any of the foregoing sections,
[0705] (b) Administering an antibody construct that binds DLL3 on a target cell and CD3 on a T cell,
   wherein said method comprises the prevention, prophylaxis, amelioration, reduction and/or alleviation of adverse events associated with immunotherapy, particularly of cancer immunotherapy, more particularly of cytokine release syndrome (CRS) or tumor lysis syndrome (TLS) in a patient as defined in the preceding embodiment, particularly a patient who is at risk of developing CRS or TLS, wherein a first dose, optionally also at least one further dose, of said inhibitor is administered before administration of said antibody construct, and wherein further dose of said inhibitor is administered following administration of said antibody construct, wherein the first dose of said inhibitor is administered within a first period before administration of the antibody construct, wherein optionally also said further dose of said inhibitor is administered within a second period before administration of the antibody construct, wherein another dose of said inhibitor is administered within a third period following administration of said antibody construct, wherein another dose of said inhibitor is administered following administration of said antibody construct within a period from 1 day to 2 days following a first administration of a dose of said antibody construct.
   (xxviii) The method of treating cancer with an antibody construct as defined above, particularly with a cancer immunotherapy, more particularly of DLL3+ target cells, according to any one of embodiments (i) to (xxvii), wherein the domain of the antibody construct used in accordance with the present invention that which binds to DLL3 comprises a VL region comprising CDR-L1, CDR-L2 and CDR-L3, wherein CDR-L1 as disclosed in Sub-Aspect B5.
   (xxix) The method of treating cancer with an antibody construct as defined above, particularly with a cancer immunotherapy, more particularly of DLL3+ target cells, according to any one of embodiments (i) to (xxviii), wherein the domain which binds to DLL3 comprises a VH region comprising CDR-H1, CDR-H2 and CDR-H3 as disclosed in Sub-Aspect B5.
   (xxx) The method of treating cancer with an antibody construct as defined above, particularly with a cancer immunotherapy, more particularly of DLL3+ target cells, according to any one of embodiments (i) to (xxviii), wherein the domain which binds to DLL3 comprises a VL region comprising CDR-L1, CDR-L2 and CDR-L3 and a VH region comprising CDR-H1, CDR-H2 and CDR-H3 as disclosed in Sub-Aspect B5.
   (xxxi) The method of treating cancer with an antibody construct as defined above, particularly with a cancer immunotherapy, more particularly of DLL3+ target cells, according to any one of embodiments (i) to (xxx), wherein the domain which binds to DLL3 comprises a VL region as depicted in Sub-Aspect B5.
   (xxxii) The method of treating cancer with an antibody construct as defined above, particularly with a cancer immunotherapy, more particularly of DLL3+ target cells, according to any one of embodiments (i) to (xxxi), wherein the domain which binds to DLL3 comprises a VH region as disclosed in Sub-Aspect B5.
   (xxxiii) The method of treating cancer with an antibody construct as defined above, particularly with a cancer immunotherapy, more particularly of DLL3+ target cells, according to any one of embodiments (i) to (xxxii), wherein the domain which binds to DLL3 comprising a VL region and a VH region consisting a VL region as disclosed in Sub-Aspect B5.
   (xxxiv) The method of treating cancer with an antibody construct as defined above, particularly with a cancer immunotherapy, more particularly of DLL3+ target cells, according to any one of embodiments (i) to (xxxiii), wherein a domain which binds to DLL3 comprising a VL region and a VH region consisting a VL region as disclosed in Sub-Aspect B5.
   (xxxv) The method of treating cancer with an antibody construct as defined above, particularly with a cancer immunotherapy, more particularly of DLL3+ target cells, according to any one of embodiments (i) to (xxxiv), wherein a domain which binds to DLL3 competes for binding to an epitope of DLL3 with an antibody construct that binds to DLL3, wherein said competing antibody construct that binds to DLL3 may have VL and/or VH regions that differ in their amino acid sequence(s) from the said antibody constructs as defined in the preceding embodiments, when both, the competing antibody constructs and the antibody constructs as defined in the preceding embodiments are co-incubated in a competition assay with target cells that express DLL3, wherein both, competition antibody construct and antibody constructs as defined in the preceding embodiments are used at equimolar concentrations in such competition assays, wherein the competition antibody construct may be labelled, and the antibody constructs as defined in the preceding embodiments may be unlabeled or differently labelled to permit a quantification to be able to distinguish the number of competition antibody construct bound to the target antigen at the end of the competition assay method, and/or wherein the amount/number of competition antibody construct that binds under such circumstances to the target is at least 50%, at least 60%, at least 70%, at least 80%, at least 90%, preferably at least 95% of all antibody constructs selectively binding to the target antigen, and/or wherein the competition antibody construct may comprise one or more, e.g. at least 2, 3, 4, 5, 6, 7, 8, 9, 10, 11, 12, 13, 14, 15, 16, 17, 18, 19, 20 or even more amino acid residues that are different from the antibody constructs as defined in the preceding embodiments.
   (xxxvi) The method of treating cancer with an antibody construct as defined above, particularly with a cancer immunotherapy, more particularly of DLL3+ target cells, according to any one of embodiments (i) to (xxxv), wherein the competition antibody constructs have at least 1, 2, 3, 4, 5, 6, 7, 8, 9, 10, or more amino acid residues that are different from the herein described antibody constructs that are characterized by a domain which binds to DLL3 comprising a VL region and a VH region consisting a VL region as depicted in Sub-Aspect B5.
   (xxxvii) The method of treating cancer with an antibody construct as defined above, particularly with a cancer immunotherapy, more particularly of DLL3+ target cells according to any one of embodiments (i) to (xxxvi), further comprising the prevention, prophylaxis, or reduction of adverse events associated with immunotherapy, particularly cancer immunotherapy, wherein an antibody construct is administered that comprises at least one domain (also referred to as “first domain”) which binds to DLL3 on the surface of a target cell, and at least one other domain (also referred to as “second domain”) which binds to CD3, preferably human CD3, on the surface of a T cell, according to any one of embodiments (i) to (xiv) of general Aspect A) and as depicted in Sub-Aspect B5.
   (xxxviii) The method of treating cancer with an antibody construct as defined above, particularly with a cancer immunotherapy, more particularly of DLL3+ target cells according to any one of embodiments (i) to (xxxvii), further comprising the prevention, prophylaxis, or reduction of adverse events associated with immunotherapy, particularly cancer immunotherapy, wherein an antibody construct is administered that comprises at least one domain which binds to DLL3 on the surface of a target cell, and at least one other domain which binds to CD3, preferably human CD3, on the surface of a T cell, according to any one of embodiments (i) to (xiv) of general Aspect A) as depicted in Sub-Aspect B5, wherein said antibody construct binds to an epitope that is selectively bound by an antibody/antibody construct that has the VH chain and/or VL chain respectively, that are disclosed in WO2010052014, particularly in the sequence listing, which is hereby incorporated by reference.
   (xxxix) Further, the present invention relates to a method of treating cancer with an antibody construct as defined above, particularly with a cancer immunotherapy, more particularly of DLL3+ target cells according to any one of embodiments (i) to (xxxviii), further comprising the prevention, prophylaxis, or reduction of adverse events associated with immunotherapy, particularly cancer immunotherapy, wherein an antibody construct is administered that comprises at least one domain which binds to DLL3 on the surface of a target cell, and at least one other domain which binds to CD3, preferably human CD3, on the surface of a T cell, according to any one of embodiments (i) to (xiv) of general Aspect A) and as further defined in embodiments (i) to (iii) of Sub-Aspect B-5, wherein the domain which binds to DLL3 comprises a VL region comprising CDR-L1, CDR-L2 and CDR-L3 as disclosed in Sub-Aspect B5.
   (xl) Further, the present invention relates to a method of treating cancer with an antibody construct as defined above, particularly with a cancer immunotherapy, more particularly of DLL3+ target cells according to any one of embodiments (i) to (xxxix), further comprising the prevention, prophylaxis, or reduction of adverse events associated with immunotherapy, particularly cancer immunotherapy, wherein an antibody construct is administered that comprises at least one domain which binds to DLL3 on the surface of a target cell, and at least one other domain which binds to CD3, preferably human CD3, on the surface of a T cell, according to any one of embodiments (i) to (xiv) of general Aspect A) and as further defined in embodiments (i) to (iv) of Sub-Aspect B-5, wherein the domain which binds to DLL3 comprises a VH region comprising CDR-H1, CDR-H2 and CDR-H3 selected from those disclosed in Sub-Aspect B5.
   (xli) Further, the present invention relates to a method of treating cancer with an antibody construct as defined above, particularly with a cancer immunotherapy, more particularly of DLL3+ target cells according to any one of embodiments (i) to (xl), further comprising the prevention, prophylaxis, or reduction of adverse events associated with immunotherapy, particularly cancer immunotherapy, wherein an antibody construct is administered that comprises at least one domain which binds to DLL3 on the surface of a target cell, and at least one other domain which binds to CD3, preferably human CD3, on the surface of a T cell, according to any one of embodiments (i) to (xiv) of general Aspect A) and as further defined in embodiments (i) to (iv) of Sub-Aspect B-5, wherein the domain which binds to DLL3 comprises a VL region comprising CDR-L1, CDR-L2 and CDR-L3 and a VH region comprising CDR-H1, CDR-H2 and CDR-H3 as disclosed in Sub-Aspect B5.
   (xlii) Further, the present invention relates to a method of treating cancer with an antibody construct as defined above, particularly with a cancer immunotherapy, more particularly of DLL3+ target cells according to any one of embodiments (i) to (xli), further comprising the prevention, prophylaxis, or reduction of adverse events associated with immunotherapy, particularly cancer immunotherapy, wherein an antibody construct is administered that comprises at least one domain which binds to DLL3 on the surface of a target cell, and at least one other domain which binds to CD3, preferably human CD3, on the surface of a T cell, according to any one of embodiments (i) to (xiv) of general Aspect A) and as further defined in embodiments (i) to (iv) of Sub-Aspect B-5, wherein the domain which binds to DLL3 comprises comprises a VL region as disclosed in Sub-Aspect B5.
   (xliii) Further, the present invention relates to a method of treating cancer with an antibody construct as defined above, particularly with a cancer immunotherapy, more particularly of DLL3+ target cells according to any one of embodiments (i) to (xlii), further comprising the prevention, prophylaxis, or reduction of adverse events associated with immunotherapy, particularly cancer immunotherapy, wherein an antibody construct is administered that comprises at least one domain which binds to DLL3 on the surface of a target cell, and at least one other domain which binds to CD3, preferably human CD3, on the surface of a T cell, according to any one of embodiments (i) to (xiv) of general Aspect A) and as further defined in embodiments (i) to (iv) of Sub-Aspect B-5, wherein the domain which binds to DLL3 comprises a VH region as disclosed in Sub-Aspect B5.
   (xliv) Further, the present invention relates to a method of treating cancer with an antibody construct as defined above, particularly with a cancer immunotherapy, more particularly of DLL3+ target cells according to any one of embodiments (i) to (xliii), further comprising the prevention, prophylaxis, or reduction of adverse events associated with immunotherapy, particularly cancer immunotherapy, wherein an antibody construct is administered that comprises at least one domain which binds to DLL3 on the surface of a target cell, and at least one other domain which binds to CD3, preferably human CD3, on the surface of a T cell, according to any one of embodiments (i) to (xiv) of general Aspect A) and as further defined in embodiments (i) to (iv) of Sub-Aspect B-5, wherein the domain which binds to DLL3 comprises a VL region and a VH region consisting a VL region as disclosed in Sub-Aspect B5 and a VH region as disclosed in Sub-Aspect B5.
   (xlv) Further, the present invention relates to a method of treating cancer with an antibody construct as defined above, particularly with a cancer immunotherapy, more particularly of DLL3+ target cells according to any one of embodiments (i) to (xliv), further comprising the prevention, prophylaxis, or reduction of adverse events associated with immunotherapy, particularly cancer immunotherapy, wherein an antibody construct is administered that comprises at least one domain which binds to DLL3 on the surface of a target cell, and at least one other domain which binds to CD3, preferably human CD3, on the surface of a T cell, according to any one of embodiments (i) to (xiv) of general Aspect A) and as further defined in embodiments (i) to (iv) of Sub-Aspect B-5, wherein the first domain which binds to DLL3 competes for binding to DLL3 with an antibody construct in accordance with the present invention that is characterized by a domain which binds to DLL3 comprising a VL region and a VH region consisting a VL region as disclosed in Sub-Aspect B5 and a VH region as disclosed in Sub-Aspect B5, or with an antibody construct having a domain which binds to DLL3 comprises a VL region comprising CDR-L1, CDR-L2 and CDR-L3 sequences and a VH region comprising CDR-H1, CDR-H2 and CDR-H3 sequences as disclosed in Sub-Aspect B5.
   (xlvi) Further, the present invention relates to a method of treating cancer with an antibody construct as defined above, particularly with a cancer immunotherapy, more particularly of DLL3+ target cells according to any one of embodiments (i) to (xlv), wherein the adverse event associated with immunotherapy is increased cytokine release of TNF, IL-1, MCP-1, and/or IL-6, particularly wherein the adverse event is cytokine release syndrome (CRS) or tumor lysis syndrome (TLS), wherein the adverse events may also include a neurological reaction, selected from the group comprising confusion, ataxia, disorientation, dysphasia, aphasia, speech impairment, cerebellar symptoms, tremor, apraxia, seizure, grand mal convulsion, palsy, and balance disorder.
   (xlvii) Further, the present invention relates to a method of treating cancer with an antibody construct as defined above, particularly with a cancer immunotherapy, more particularly of DLL3+ target cells according to any one of embodiments (i) to (xlvi), wherein the second domain of said antibody construct binds to CD3, preferably human CD3, epsilon and to Callithrix jacchus or Saimiri sciureus CD3 epsilon.
   (xlviii) Further, the present invention relates to a method of treating cancer with an antibody construct as defined above, particularly with a cancer immunotherapy, more particularly of DLL3+ target cells according to any one of embodiments (i) to (xlvii), wherein
[0706] (a) the antibody construct is a single chain antibody construct,
[0707] (b) the first domain is in the format of an scFv,
[0708] (c) the second domain is in the format of an scFv,
[0709] (d) the first and the second domain are connected via a linker, and/or
[0710] (e) the antibody construct comprises a domain providing an extended serum half-life.
   (xlix) Further, the present invention relates to a method of treating cancer with an antibody construct as defined above, particularly with a cancer immunotherapy, more particularly of DLL3+ target cells according to any one of embodiments (i) to (xlviii), wherein the inhibitor/antagonist of TNF/TNFR that reduces TNF/TNFR signaling is selected from the group comprising small molecules, biological molecules, antibodies and derivatives thereof, aptamers, and the like.
   (l) Further, the present invention relates to a method of treating cancer with an antibody construct as defined above, particularly with a cancer immunotherapy, more particularly of DLL3+ target cells according to any one of embodiments (i) to (xlix), wherein the inhibitor/antagonist of TNF/TNFR that reduces TNF/TNFR signaling is selected from the group of TNF inhibitors comprising etanercept, infliximab, adalimumab, certolizumab Pergol, and golimumab, particularly etanercept.
   (li) Further, the present invention relates to a method of treating cancer with an antibody construct as defined above, particularly with a cancer immunotherapy, more particularly of DLL3+ target cells according to any one of embodiments (i) to (l), for administration to a patient at risk of developing adverse events or having an intolerance to at least one of a group comprising corticosteroids, IL-6-inhibitors, IL-6R-inhibitors, and/or TNF/TNFR inhibitors different from an inhibitor/antagonist of TNF/TNFR that reduces TNF/TNFR signaling according to any of the preceding embodiments.
   (lii) Further, the present invention relates to a method of treating cancer with an antibody construct as defined above, particularly with a cancer immunotherapy, more particularly of DLL3+ target cells according to any one of embodiments (i) to (10, for administration to a patient at risk of developing adverse events or having an intolerance to corticosteroids, wherein the corticosteroid is dexamethasone.
   (liii) Further, the present invention relates to a method of treating cancer with an antibody construct as defined above, particularly with a cancer immunotherapy, more particularly of DLL3+ target cells according to any one of embodiments (i) to (lii), for administration to a patient at risk of developing adverse events or having an intolerance to IL-6-antagonists and/or IL-6R-antagonists, wherein the IL-6-antagonists and/or IL-6R-antagonists are selected from the group comprising tocilizumab, siltuximab, olokizumab, elsilimomab, clazakizumab, sirukumab, particularly tocilizumab, and/or wherein said combination product is for administration to a patient at risk of developing adverse events or having an intolerance to TNF/TNFR inhibitors, wherein the TNF/TNFR inhibitor is selected from the group comprising infliximab, adalimumab, certolizumab Pergol, and/or golimumab.
   (liv) Further, the present invention relates to a method of treating cancer with an antibody construct as defined above, particularly with a cancer immunotherapy, more particularly of DLL3+ target cells according to any one of embodiments (i) to (liii), further comprising administering at least one corticosteroid, particularly wherein said corticostoid is dexamethasone.
   (lv) Further, the present invention relates to a method of treating cancer with an antibody construct as defined above, particularly with a cancer immunotherapy, more particularly of DLL3+ target cells according to any one of embodiments (i) to (liii), further comprising administering an IL-6R-antagonist, wherein said IL-6R-antagonist is tocilizumab.
   (lvi) Further, the present invention relates to a method of treating cancer with an antibody construct as defined above, particularly with a cancer immunotherapy, more particularly of DLL3+ target cells according to any one of embodiments (i) to (liv), further comprising administering at least one corticosteroid, particularly dexamethasone and/or at least one IL-6 and/or IL-6R-antagonist, particularly tocilizumab, wherein said at least one corticosteroid and/or said IL-6 and/or IL-6R-antagonist is for administration to a patient in need thereof prior to, concomitant with, and/or after administration of said antibody construct.

### Further Items of the Invention are

[0711] Item 1: A method for the treatment of cancer and/or for the prophylaxis, prevention, reduction, amelioration, and/or alleviation of adverse events associated with cancer immunotherapy, particularly with cancer immunotherapy engaging T cells via CD3 binding antibody constructs in a human patient, said method comprising
[0712] (a) Administering an antibody construct that binds selectively to a target antigen on a cancer cell and to human CD3 on the surface of a T cell,
[0713] (b) Administering an inhibitor/antagonist of TNF/TNFR reducing TNF/TNFR signaling, and/or administering an inhibitor/antagonist of IL6/IL6R that reduces IL6/IL6R signaling,
   wherein a first dose of said inhibitor/antagonist of TNF/TNFR that reduces TNF/TNFR signaling and/or a first dose of said inhibitor/antagonist of IL6/IL6R that reduces IL6/IL6R according to (b) signaling is administered before administration of a first dose of said antibody construct (a) within a first period, said period ranging from 5 minutes to 7 days prior to administration of the antibody construct, particularly wherein said period is ranging from 15 minutes to 7 days prior to administration of the antibody construct.

[0714] Item 2: The method of Item 1, wherein the antibody construct binds selectively to a target antigen on a target cell selected from the group comprising CD19, CD33, FLT3, PSMA, and DLL3.

[0715] Item 3: The method of any one of Items 1 and 2, wherein said method comprises the prevention, prophylaxis, amelioration, reduction and/or alleviation of adverse events associated with cancer immunotherapy, particularly wherein these adverse events are selected from cytokine release syndrome (CRS) and tumor lysis syndrome (TLS), particularly in a patient at risk of developing CRS and/or TLS.

[0716] Item 4: The method of any one of Items 1 to 3, wherein at least one further dose, particularly a second dose of said inhibitor/antagonist of TNF/TNFR that reduces TNF/TNFR signaling and/or said inhibitor/antagonist of IL6/IL6R that reduces IL6/IL6R signaling according to (b) is administered before administration of said antibody construct.

[0717] Item 5: The method of any one of Items 1 to 4, wherein at least one further dose of said inhibitor/antagonist of TNF/TNFR that reduces TNF/TNFR signaling (b) and/or said inhibitor/antagonist of IL6/IL6R that reduces IL6/IL6R signaling (c) is administered following administration of said antibody construct.

[0718] Item 6: The method of any one of Items 1 to 5, wherein a first dose, and optionally also at least one further dose, of said inhibitor/antagonist of TNF/TNFR that reduces TNF/TNFR signaling and/or said inhibitor/antagonist of IL6/IL6R that reduces IL6/IL6R signaling according to (b) is/are administered within a first period before administration of said antibody construct, and optionally wherein at least one further dose of said inhibitor/antagonist of TNF/TNFR that reduces TNF/TNFR signaling and/or said inhibitor/antagonist of IL6/IL6R that reduces IL6/IL6R signaling according to (b) is administered within a second period before administration of said antibody construct, and optionally wherein at least one dose of said inhibitor/antagonist of TNF/TNFR that reduces TNF/TNFR signaling and/or said inhibitor/antagonist of IL6/IL6R that reduces IL6/IL6R signaling according to (b) is administered within a third period following administration of said antibody construct.

[0719] Item 7: The method of any one of Items 1 to 6, wherein said first dose, and optionally also at least one further dose of said inhibitor of TNF/TNFR that reduces TNF/TNFR signaling and/or said inhibitor/antagonist of IL6/IL6R that reduces IL6/IL6R signaling according to (b) is/are administered before administration of said antibody construct, and wherein the at least one further dose of said inhibitor/antagonist of TNF/TNFR that reduces TNF/TNFR signaling and/or said inhibitor/antagonist of IL6/IL6R that reduces IL6/IL6R signaling according to (b) is administered following administration of said antibody construct, wherein the first dose of said inhibitor/antagonist of TNF/TNFR that reduces TNF/TNFR signaling and/or said inhibitor/antagonist of IL6/IL6R that reduces IL6/IL6R signaling according to (b) is administered within a first period before administration of the antibody construct, said period ranging from 30 minutes to 7 days prior to administration of the antibody construct, wherein also said at least one further dose of said inhibitor/antagonist of TNF/TNFR that reduces TNF/TNFR signaling and/or said inhibitor/antagonist of IL6/IL6R that reduces IL6/IL6R signaling according to (b) is administered within a second period before administration of the antibody construct, and optionally wherein said at least one other dose of said inhibitor/antagonist of TNF/TNFR that reduces TNF/TNFR signaling and/or said inhibitor/antagonist of IL6/IL6R that reduces IL6/IL6R signaling according to (b) is administered within a third period following administration of said antibody construct.

[0720] Item 8: The method of any one of Items 1 to 7, wherein said first dose, and optionally also at least one further dose of said inhibitor of TNF/TNFR that reduces TNF/TNFR signaling and/or said inhibitor/antagonist of IL6/IL6R that reduces IL6/IL6R signaling according to (b) is/are administered before administration of said antibody construct, and wherein the at least one further dose of said inhibitor/antagonist of TNF/TNFR that reduces TNF/TNFR signaling and/or said inhibitor/antagonist of IL6/IL6R that reduces IL6/IL6R signaling according to (b) is administered following administration of said antibody construct, wherein the first dose of said inhibitor/antagonist of TNF/TNFR that reduces TNF/TNFR signaling and/or said inhibitor/antagonist of IL6/IL6R that reduces IL6/IL6R signaling according to (b) is administered within a first period before administration of the antibody construct, said period ranging from 30 minutes to 6 days prior to administration of the antibody construct, wherein also said at least one further dose of said inhibitor/antagonist of TNF/TNFR that reduces TNF/TNFR signaling and/or said inhibitor/antagonist of IL6/IL6R that reduces IL6/IL6R signaling according to (b) is administered within a second period before administration of the antibody construct, and optionally wherein said at least one other dose of said inhibitor/antagonist of TNF/TNFR that reduces TNF/TNFR signaling and/or said inhibitor/antagonist of IL6/IL6R that reduces IL6/IL6R signaling according to (b) is administered within a third period following administration of said antibody construct.

[0721] Item 9: The method of any one of Items 1 to 8, wherein said first dose, and optionally also at least one further dose of said inhibitor of TNF/TNFR that reduces TNF/TNFR signaling and/or said inhibitor/antagonist of IL6/IL6R that reduces IL6/IL6R signaling according to (b) is/are administered before administration of said antibody construct, and wherein the at least one further dose of said inhibitor/antagonist of TNF/TNFR that reduces TNF/TNFR signaling and/or said inhibitor/antagonist of IL6/IL6R that reduces IL6/IL6R signaling according to (b) is administered following administration of said antibody construct, wherein the first dose of said inhibitor/antagonist of TNF/TNFR that reduces TNF/TNFR signaling and/or said inhibitor/antagonist of IL6/IL6R that reduces IL6/IL6R signaling according to (b) is administered within a first period before administration of the antibody construct, said period ranging from 30 minutes to 5 days prior to administration of the antibody construct, wherein also said at least one further dose of said inhibitor/antagonist of TNF/TNFR that reduces TNF/TNFR signaling and/or said inhibitor/antagonist of IL6/IL6R that reduces IL6/IL6R signaling according to (b) is administered within a second period before administration of the antibody construct, and optionally wherein said at least one other dose of said inhibitor/antagonist of TNF/TNFR that reduces TNF/TNFR signaling and/or said inhibitor/antagonist of IL6/IL6R that reduces IL6/IL6R signaling according to (b) is administered within a third period following administration of said antibody construct.

[0722] Item 10: The method of any one of Items 1 to 9, wherein said first dose, and optionally also at least one further dose of said inhibitor/antagonist of TNF/TNFR that reduces TNF/TNFR signaling and/or said inhibitor/antagonist of IL6/IL6R that reduces IL6/IL6R signaling according to (b) is/are administered before administration of said antibody construct, and wherein the at least one further dose of said inhibitor/antagonist of TNF/TNFR that reduces TNF/TNFR signaling and/or said inhibitor/antagonist of IL6/IL6R that reduces IL6/IL6R signaling according to (b) is administered following administration of said antibody construct, wherein the first dose of said inhibitor/antagonist of TNF/TNFR that reduces TNF/TNFR signaling and/or said inhibitor/antagonist of IL6/IL6R that reduces IL6/IL6R signaling according to (b) is administered within a first period before administration of the antibody construct, said period ranging from 30 minutes to 4 days prior to administration of the antibody construct, wherein also said at least one optional further dose of said inhibitor/antagonist of TNF/TNFR that reduces TNF/TNFR signaling and/or said inhibitor/antagonist of IL6/IL6R that reduces IL6/IL6R signaling according to (b) is administered within a second period before administration of the antibody construct, and optionally wherein said at least one other dose of said inhibitor/antagonist of TNF/TNFR that reduces TNF/TNFR signaling and/or said inhibitor/antagonist of IL6/IL6R that reduces IL6/IL6R signaling according to (b) is administered within a third period following administration of said antibody construct.

[0723] Item 11: The method of any one of Items 1 to 10, wherein said first dose, and optionally also at least one further dose of said inhibitor/antagonist of TNF/TNFR that reduces TNF/TNFR signaling and/or said inhibitor/antagonist of IL6/IL6R that reduces IL6/IL6R signaling according to (b) is/are administered before administration of said antibody construct, and wherein the at least one further dose of said inhibitor/antagonist of TNF/TNFR that reduces TNF/TNFR signaling and/or said inhibitor/antagonist of IL6/IL6R that reduces IL6/IL6R signaling according to (b) is administered following administration of said antibody construct, wherein the first dose of said inhibitor/antagonist of TNF/TNFR that reduces TNF/TNFR signaling and/or said inhibitor/antagonist of IL6/IL6R that reduces IL6/IL6R signaling according to (b) is administered within a first period before administration of the antibody construct, said period ranging from 30 minutes to 3 days prior to administration of the antibody construct, wherein also said at least one optional further dose of said inhibitor/antagonist of TNF/TNFR that reduces TNF/TNFR signaling and/or said inhibitor/antagonist of IL6/IL6R that reduces IL6/IL6R signaling according to (b) is administered within a second period before administration of the antibody construct, and optionally wherein said at least one other dose of said inhibitor/antagonist of TNF/TNFR that reduces TNF/TNFR signaling and/or said inhibitor/antagonist of IL6/IL6R that reduces IL6/IL6R signaling according to (b) is administered within a third period following administration of said antibody construct.

[0724] Item 12: The method of any one of Items 1 to 11, wherein said first dose, and optionally also at least one further dose of said inhibitor/antagonist of TNF/TNFR that reduces TNF/TNFR signaling and/or said inhibitor/antagonist of IL6/IL6R that reduces IL6/IL6R signaling according to (b) is/are administered before administration of said antibody construct, and wherein the at least one further dose of said inhibitor/antagonist of TNF/TNFR that reduces TNF/TNFR signaling and/or said inhibitor/antagonist of IL6/IL6R that reduces IL6/IL6R signaling according to (b) is administered following administration of said antibody construct, wherein the first dose of said inhibitor/antagonist of TNF/TNFR that reduces TNF/TNFR signaling and/or said inhibitor/antagonist of IL6/IL6R that reduces IL6/IL6R signaling according to (b) is administered within a first period before administration of the antibody construct, particularly wherein the inhibitor/antagonist of TNF/TNFR that reduces TNF/TNFR signaling (b) and/or said inhibitor/antagonist of IL6/IL6R that reduces IL6/IL6R signaling is selected from etanercept and/or tocilicumab, said period ranging from 30 minutes to 2 days prior to administration of the antibody construct, particularly wherein the target antigen is Flt3 or CD33, wherein also said at least one further dose of said inhibitor/antagonist of TNF/TNFR that reduces TNF/TNFR signaling and/or said inhibitor/antagonist of IL6/IL6R that reduces IL6/IL6R signaling according to (b) is administered within a second period before administration of the antibody construct, and optionally wherein said inhibitor/antagonist of TNF/TNFR that reduces TNF/TNFR signaling and/or said inhibitor/antagonist of IL6/IL6R that reduces IL6/IL6R signaling according to (b) is administered within a third period following administration of said antibody construct.

[0725] Item 13: The method of any one of Items 1 to 12, wherein said first dose, and optionally also at least one further dose of said inhibitor/antagonist of TNF/TNFR that reduces TNF/TNFR signaling and/or said inhibitor/antagonist of IL6/IL6R that reduces IL6/IL6R signaling according to (b) is/are administered before administration of said antibody construct, and wherein the at least one further dose of said inhibitor/antagonist of TNF/TNFR that reduces TNF/TNFR signaling and/or said inhibitor/antagonist of IL6/IL6R that reduces IL6/IL6R signaling according to (b) is administered following administration of said antibody construct, wherein the first dose of said inhibitor/antagonist of TNF/TNFR that reduces TNF/TNFR signaling and/or said inhibitor/antagonist of IL6/IL6R that reduces IL6/IL6R signaling according to (b) is administered within a first period before administration of the antibody construct, particularly wherein said inhibitor/antagonist of TNF/TNFR that reduces TNF/TNFR signaling and/or said inhibitor/antagonist of IL6/IL6R that reduces IL6/IL6R signaling according to (b) is selected from etanercept and/or tocilicumab, said period ranging from 30 minutes to 1 day prior to administration of the antibody construct, particularly wherein the target antigen is Flt3 or CD33, more particularly wherein the target antigen is CD33, wherein also said at least one further dose of said inhibitor/antagonist of TNF/TNFR that reduces TNF/TNFR signaling and/or said inhibitor/antagonist of IL6/IL6R that reduces IL6/IL6R signaling according to (b) is administered within a second period before administration of the antibody construct, and optionally wherein said at least one other dose of said inhibitor/antagonist of TNF/TNFR that reduces TNF/TNFR signaling and/or said inhibitor/antagonist of IL6/IL6R that reduces IL6/IL6R signaling according to (b) is administered within a third period following administration of said antibody construct.

[0726] Item 14: The method of any one of Items 1 to 13, wherein said first dose, and optionally also said at least one further dose of said inhibitor/antagonist of TNF/TNFR that reduces TNF/TNFR signaling and/or said inhibitor/antagonist of IL6/IL6R that reduces IL6/IL6R signaling according to (b) is administered following administration of said antibody construct, wherein the first dose of said inhibitor/antagonist of TNF/TNFR that reduces TNF/TNFR signaling and/or said inhibitor/antagonist of IL6/IL6R that reduces IL6/IL6R signaling according to (b) is administered within a first period before administration of the antibody construct, particularly wherein said inhibitor/antagonist of TNF/TNFR that reduces TNF/TNFR signaling and/or said inhibitor/antagonist of IL6/IL6R that reduces IL6/IL6R signaling according to (b) is selected from etanercept and/or tocilicumab, wherein also said inhibitor/antagonist of TNF/TNFR that reduces TNF/TNFR signaling and/or said inhibitor/antagonist of IL6/IL6R that reduces IL6/IL6R signaling according to (b) is administered within a second period before administration of the antibody construct, wherein said period is shorter than the first period of administration of the inhibitor, and optionally wherein said inhibitor/antagonist of TNF/TNFR that reduces TNF/TNFR signaling and/or said inhibitor/antagonist of IL6/IL6R that reduces IL6/IL6R signaling according to (b) is administered within a third period following administration of said antibody construct.

[0727] Item 15: The method of any one of Items 1 to 14, wherein said first dose, optionally also said at least one further dose of said inhibitor/antagonist of TNF/TNFR that reduces TNF/TNFR signaling and/or said inhibitor/antagonist of IL6/IL6R that reduces IL6/IL6R signaling according to (b) is/are administered before administration of said antibody construct, and wherein optionally the at least one further dose of said inhibitor/antagonist of TNF/TNFR that reduces TNF/TNFR signaling and/or said inhibitor/antagonist of IL6/IL6R that reduces IL6/IL6R signaling according to (b) is administered following administration of said antibody construct, wherein the first dose of said inhibitor/antagonist of TNF/TNFR that reduces TNF/TNFR signaling and/or said inhibitor/antagonist of IL6/IL6R that reduces IL6/IL6R signaling according to (b) is administered within a first period before administration of the antibody construct, particularly wherein said inhibitor/antagonist of TNF/TNFR that reduces TNF/TNFR signaling and/or said inhibitor/antagonist of IL6/IL6R that reduces IL6/IL6R signaling according to (b) is selected from etanercept and/or tocilicumab, wherein also the further said inhibitor/antagonist of TNF/TNFR that reduces TNF/TNFR signaling and/or said inhibitor/antagonist of IL6/IL6R that reduces IL6/IL6R signaling according to (b) is administered within a second period before administration of the antibody construct, wherein said second period is shorter than the first period of administration of said inhibitor/antagonist of TNF/TNFR that reduces TNF/TNFR signaling and/or said inhibitor/antagonist of IL6/IL6R that reduces IL6/IL6R signaling according to (b), wherein the further dose of said inhibitor/antagonist of TNF/TNFR that reduces TNF/TNFR signaling and/or said inhibitor/antagonist of IL6/IL6R that reduces IL6/IL6R signaling according to (b) is administered within a period ranging from 30 minutes to 5 days, 30 minutes to 4 days, 30 minutes to 3 days, 30 minutest to 2 days, particularly 30 minutes to 1 day prior to administration of the antibody construct, and optionally wherein said at least one other dose of said inhibitor/antagonist of TNF/TNFR that reduces TNF/TNFR signaling and/or said inhibitor/antagonist of IL6/IL6R that reduces IL6/IL6R signaling according to (b) is administered within a third period following administration of said antibody construct.

[0728] Item 16: The method of any one of Items 1 to 15, wherein said first dose, optionally also said at least one further dose of said inhibitor/antagonist of TNF/TNFR that reduces TNF/TNFR signaling and/or said inhibitor/antagonist of IL6/IL6R that reduces IL6/IL6R signaling according to (b) is/are administered before administration of said antibody construct, and optionally wherein at least one further dose of said inhibitor/antagonist of TNF/TNFR that reduces TNF/TNFR signaling and/or said inhibitor/antagonist of IL6/IL6R that reduces IL6/IL6R signaling according to (b) is administered following administration of said antibody construct, wherein the first dose of said inhibitor/antagonist of TNF/TNFR that reduces TNF/TNFR signaling and/or said inhibitor/antagonist of IL6/IL6R that reduces IL6/IL6R signaling according to (b) is administered within a first period before administration of the antibody construct, particularly wherein the inhibitor/antagonist of TNF/TNFR that reduces TNF/TNFR signaling (b) and/or said inhibitor/antagonist of IL6/IL6R that reduces IL6/IL6R signaling is selected from etanercept and/or tocilicumab, wherein also said at least one further dose of said inhibitor/antagonist of TNF/TNFR that reduces TNF/TNFR signaling and/or said inhibitor/antagonist of IL6/IL6R that reduces IL6/IL6R signaling according to (b) is administered within a second period before administration of the antibody construct, wherein said second period is shorter than the first period of administration of said inhibitor/antagonist of TNF/TNFR that reduces TNF/TNFR signaling and/or said inhibitor/antagonist of IL6/IL6R that reduces IL6/IL6R signaling according to (b), wherein the further dose of said inhibitor/antagonist of TNF/TNFR that reduces TNF/TNFR signaling and/or said inhibitor/antagonist of IL6/IL6R that reduces IL6/IL6R signaling according to (b) is administered within a period ranging from 30 minutes to 5 days, 30 minutes to 4 days, 30 minutes to 3 days, 30 minutest to 2 days, particularly 30 minutes to 1 day prior to administration of the antibody construct, and optionally wherein said at least one other dose of said inhibitor/antagonist of TNF/TNFR that reduces TNF/TNFR signaling and/or said inhibitor/antagonist of IL6/IL6R that reduces IL6/IL6R signaling according to (b) is administered within a third period following administration of said antibody construct, wherein the first dose and at least one further dose of said inhibitor/antagonist of TNF/TNFR that reduces TNF/TNFR signaling and/or said inhibitor/antagonist of IL6/IL6R that reduces IL6/IL6R signaling according to (b) comprise different quantities of inhibitor and/or different quantities of the antibody construct.

[0729] Item 17: The method of any one of Items 1 to 16, wherein said first dose, optionally also said at least one further dose of said inhibitor/antagonist of TNF/TNFR that reduces TNF/TNFR signaling and/or said inhibitor/antagonist of IL6/IL6R that reduces IL6/IL6R signaling according to (b) is/are administered before administration of said antibody construct, and optionally wherein at least one further dose of said inhibitor/antagonist of TNF/TNFR that reduces TNF/TNFR signaling and/or said inhibitor/antagonist of IL6/IL6R that reduces IL6/IL6R signaling according to (b) is administered following administration of said antibody construct, wherein the first dose of said inhibitor/antagonist of TNF/TNFR that reduces TNF/TNFR signaling and/or said inhibitor/antagonist of IL6/IL6R that reduces IL6/IL6R signaling according to (b) is administered within a first period before administration of the antibody construct, particularly wherein said inhibitor/antagonist of TNF/TNFR that reduces TNF/TNFR signaling and/or said inhibitor/antagonist of IL6/IL6R that reduces IL6/IL6R signaling according to (b) is selected from etanercept and/or tocilicumab, wherein also said at least one further dose of said inhibitor/antagonist of TNF/TNFR that reduces TNF/TNFR signaling and/or said inhibitor/antagonist of IL6/IL6R that reduces IL6/IL6R signaling according to (b) is administered within a second period before administration of the antibody construct, and optionally wherein said at least one other dose of said inhibitor/antagonist of TNF/TNFR that reduces TNF/TNFR signaling and/or said inhibitor/antagonist of IL6/IL6R that reduces IL6/IL6R signaling according to (b) is administered within a third period following administration of said antibody construct, wherein the first dose and at least one further dose of said inhibitor/antagonist of TNF/TNFR that reduces TNF/TNFR signaling and/or said inhibitor/antagonist of IL6/IL6R that reduces IL6/IL6R signaling according to (b) comprise identical quantities of inhibitor and/or identical quantities of the antibody construct.

[0730] Item 18: The method of any one of Items 1 to 17, wherein said first dose, optionally also said at least one further dose of said inhibitor/antagonist of TNF/TNFR that reduces TNF/TNFR signaling and/or said inhibitor/antagonist of IL6/IL6R that reduces IL6/IL6R signaling according to (b) is/are administered before administration of said antibody construct, and optionally wherein at least one further dose of said inhibitor/antagonist of TNF/TNFR that reduces TNF/TNFR signaling and/or said inhibitor/antagonist of IL6/IL6R that reduces IL6/IL6R signaling according to (b) is administered following administration of said antibody construct, wherein the first dose of said inhibitor/antagonist of TNF/TNFR that reduces TNF/TNFR signaling and/or said inhibitor/antagonist of IL6/IL6R that reduces IL6/IL6R signaling according to (b) is administered within a first period before administration of the antibody construct, particularly wherein said inhibitor/antagonist of TNF/TNFR that reduces TNF/TNFR signaling and/or said inhibitor/antagonist of IL6/IL6R that reduces IL6/IL6R signaling according to (b) is selected from etanercept and/or tocilicumab, wherein also said at least one further dose of said inhibitor/antagonist of TNF/TNFR that reduces TNF/TNFR signaling and/or said inhibitor/antagonist of IL6/IL6R that reduces IL6/IL6R signaling according to (b) is administered within a second period before administration of the antibody construct, and optionally wherein said at least one other dose of said inhibitor/antagonist of TNF/TNFR that reduces TNF/TNFR signaling and/or said inhibitor/antagonist of IL6/IL6R that reduces IL6/IL6R signaling according to (b) is administered within a third period following administration of said antibody construct, wherein another dose of said inhibitor/antagonist of TNF/TNFR that reduces TNF/TNFR signaling and/or said inhibitor/antagonist of IL6/IL6R that reduces IL6/IL6R signaling according to (b) is administered following administration of said antibody construct within a period from 1 day to 7 days following a first administration of a dose of said antibody construct.

[0731] Item 19: The method of any one of Items 1 to 18, wherein said first dose, optionally also said at least one further dose of said inhibitor/antagonist of TNF/TNFR that reduces TNF/TNFR signaling and/or said inhibitor/antagonist of IL6/IL6R that reduces IL6/IL6R signaling according to (b) is/are administered before administration of said antibody construct, and optionally wherein at least one further dose of said inhibitor/antagonist of TNF/TNFR that reduces TNF/TNFR signaling and/or said inhibitor/antagonist of IL6/IL6R that reduces IL6/IL6R signaling according to (b) is administered following administration of said antibody construct, wherein the first dose of said inhibitor/antagonist of TNF/TNFR that reduces TNF/TNFR signaling and/or said inhibitor/antagonist of IL6/IL6R that reduces IL6/IL6R signaling according to (b) is administered within a first period before administration of the antibody construct, particularly wherein said inhibitor/antagonist of TNF/TNFR that reduces TNF/TNFR signaling and/or said inhibitor/antagonist of IL6/IL6R that reduces IL6/IL6R signaling according to (b) is selected from etanercept and/or tocilicumab, wherein also said at least one further dose of said inhibitor/antagonist of TNF/TNFR that reduces TNF/TNFR signaling and/or said inhibitor/antagonist of IL6/IL6R that reduces IL6/IL6R signaling according to (b) is administered within a second period before administration of the antibody construct, and optionally wherein said at least one other dose of said inhibitor/antagonist of TNF/TNFR that reduces TNF/TNFR signaling and/or said inhibitor/antagonist of IL6/IL6R that reduces IL6/IL6R signaling according to (b) is administered within a third period following administration of said antibody construct, wherein another dose of said inhibitor/antagonist of TNF/TNFR that reduces TNF/TNFR signaling and/or said inhibitor/antagonist of IL6/IL6R that reduces IL6/IL6R signaling according to (b) is administered following administration of said antibody construct within a period from 1 day to 6 days following a first administration of a dose of said antibody construct.

[0732] Item 20: The method of any one of Items 1 to 19, wherein said first dose, and optionally said also at least one further dose of said inhibitor/antagonist of TNF/TNFR that reduces TNF/TNFR signaling and/or said inhibitor/antagonist of IL6/IL6R that reduces IL6/IL6R signaling according to (b) is/are administered before administration of said antibody construct, and optionally wherein at least one further dose of said inhibitor/antagonist of TNF/TNFR that reduces TNF/TNFR signaling and/or said inhibitor/antagonist of IL6/IL6R that reduces IL6/IL6R signaling according to (b) is administered following administration of said antibody construct, wherein the first dose of said inhibitor/antagonist of TNF/TNFR that reduces TNF/TNFR signaling and/or said inhibitor/antagonist of IL6/IL6R that reduces IL6/IL6R signaling according to (b) is administered within a first period before administration of the antibody construct, particularly wherein said inhibitor/antagonist of TNF/TNFR that reduces TNF/TNFR signaling and/or said inhibitor/antagonist of IL6/IL6R that reduces IL6/IL6R signaling according to (b) is selected from etanercept and/or tocilicumab, wherein also said at least one further dose of said inhibitor/antagonist of TNF/TNFR that reduces TNF/TNFR signaling and/or said inhibitor/antagonist of IL6/IL6R that reduces IL6/IL6R signaling according to (b) is administered within a second period before administration of the antibody construct, and optionally wherein said at least one other dose of said inhibitor/antagonist of TNF/TNFR that reduces TNF/TNFR signaling and/or said inhibitor/antagonist of IL6/IL6R that reduces IL6/IL6R signaling according to (b) is administered within a third period following administration of said antibody construct, wherein another dose of said inhibitor/antagonist of TNF/TNFR that reduces TNF/TNFR signaling and/or said inhibitor/antagonist of IL6/IL6R that reduces IL6/IL6R signaling according to (b) is administered following administration of said antibody construct within a period from 1 hour to 5 days following a first administration of a dose of said antibody construct.

[0733] Item 21: The method of any one of Items 1 to 20, wherein said first dose, and optionally also said at least one further dose of said inhibitor/antagonist of TNF/TNFR that reduces TNF/TNFR signaling and/or said inhibitor/antagonist of IL6/IL6R that reduces IL6/IL6R signaling according to (b) is/are administered before administration of said antibody construct, and optionally wherein at least one further dose of said inhibitor/antagonist of TNF/TNFR that reduces TNF/TNFR signaling and/or said inhibitor/antagonist of IL6/IL6R that reduces IL6/IL6R signaling according to (b) is administered following administration of said antibody construct, wherein the first dose of said inhibitor/antagonist of TNF/TNFR that reduces TNF/TNFR signaling and/or said inhibitor/antagonist of IL6/IL6R that reduces IL6/IL6R signaling according to (b) is administered within a first period before administration of the antibody construct, particularly wherein said inhibitor/antagonist of TNF/TNFR that reduces TNF/TNFR signaling and/or said inhibitor/antagonist of IL6/IL6R that reduces IL6/IL6R signaling according to (b) is selected from etanercept and/or tocilicumab, wherein also said at least one further dose of said inhibitor/antagonist of TNF/TNFR that reduces TNF/TNFR signaling and/or said inhibitor/antagonist of IL6/IL6R that reduces IL6/IL6R signaling according to (b) is administered within a second period before administration of the antibody construct, and optionally wherein said at least one other dose said inhibitor/antagonist of TNF/TNFR that reduces TNF/TNFR signaling and/or said inhibitor/antagonist of IL6/IL6R that reduces IL6/IL6R signaling according to (b) is administered within a third period following administration of said antibody construct, wherein another dose of said inhibitor/antagonist of TNF/TNFR that reduces TNF/TNFR signaling and/or said inhibitor/antagonist of IL6/IL6R that reduces IL6/IL6R signaling according to (b) is administered following administration of said antibody construct within a period from 1 hour to 4 days following a first administration of a dose of said antibody construct.

[0734] Item 22: The method of any one of Items 1 to 21, wherein said first dose, and optionally also said at least one further dose of said inhibitor/antagonist of TNF/TNFR that reduces TNF/TNFR signaling and/or said inhibitor/antagonist of IL6/IL6R that reduces IL6/IL6R signaling according to (b) is/are administered before administration of said antibody construct, and optionally wherein at least one further dose of said inhibitor/antagonist of TNF/TNFR that reduces TNF/TNFR signaling and/or said inhibitor/antagonist of IL6/IL6R that reduces IL6/IL6R signaling according to (b) is administered following administration of said antibody construct, wherein the first dose of said inhibitor/antagonist of TNF/TNFR that reduces TNF/TNFR signaling and/or said inhibitor/antagonist of IL6/IL6R that reduces IL6/IL6R signaling according to (b) is administered within a first period before administration of the antibody construct, particularly wherein said inhibitor/antagonist of TNF/TNFR that reduces TNF/TNFR signaling and/or said inhibitor/antagonist of IL6/IL6R that reduces IL6/IL6R signaling according to (b) is selected from etanercept and/or tocilicumab, wherein also said at least one further dose of said inhibitor/antagonist of TNF/TNFR that reduces TNF/TNFR signaling and/or said inhibitor/antagonist of IL6/IL6R that reduces IL6/IL6R signaling according to (b) is administered within a second period before administration of the antibody construct, and optionally wherein said at least one other dose of said inhibitor/antagonist of TNF/TNFR that reduces TNF/TNFR signaling and/or said inhibitor/antagonist of IL6/IL6R that reduces IL6/IL6R signaling according to (b) is administered within a third period following administration of said antibody construct, wherein another dose of said inhibitor/antagonist of TNF/TNFR that reduces TNF/TNFR signaling and/or said inhibitor/antagonist of IL6/IL6R that reduces IL6/IL6R signaling according to (b) is administered following administration of said antibody construct within a period from 1 hour to 3 days following a first administration of a dose of said antibody construct.

[0735] Item 23: The method of any one of Items 1 to 22, wherein said first dose, and optionally also said at least one further dose of said inhibitor/antagonist of TNF/TNFR that reduces TNF/TNFR signaling and/or said inhibitor/antagonist of IL6/IL6R that reduces IL6/IL6R signaling according to (b) is/are administered before administration of said antibody construct, and optionally wherein at least one further dose of said inhibitor/antagonist of TNF/TNFR that reduces TNF/TNFR signaling and/or said inhibitor/antagonist of IL6/IL6R that reduces IL6/IL6R signaling according to (b) is administered following administration of said antibody construct, wherein the first dose of said inhibitor/antagonist of TNF/TNFR that reduces TNF/TNFR signaling and/or said inhibitor/antagonist of IL6/IL6R that reduces IL6/IL6R signaling according to (b) is administered within a first period before administration of the antibody construct, particularly wherein said inhibitor/antagonist of TNF/TNFR that reduces TNF/TNFR signaling and/or said inhibitor/antagonist of IL6/IL6R that reduces IL6/IL6R signaling according to (b) is selected from etanercept and/or tocilicumab, wherein also said at least one further dose of said inhibitor/antagonist of TNF/TNFR that reduces TNF/TNFR signaling and/or said inhibitor/antagonist of IL6/IL6R that reduces IL6/IL6R signaling according to (b) is administered within a second period before administration of the antibody construct, and optionally wherein said at least one other dose of said inhibitor/antagonist of TNF/TNFR that reduces TNF/TNFR signaling and/or said inhibitor/antagonist of IL6/IL6R that reduces IL6/IL6R signaling according to (b) is administered within a third period following administration of said antibody construct, wherein another dose of said inhibitor/antagonist of TNF/TNFR that reduces TNF/TNFR signaling and/or said inhibitor/antagonist of IL6/IL6R that reduces IL6/IL6R signaling according to (b) is administered following administration of said antibody construct within a period from 1 hour to 2 days following a first administration of a dose of said antibody construct.

[0736] Item 24: The method of any one of Items 1 to 21, wherein said target antigen is CD33, particularly wherein the antibody construct comprises a first domain that comprises the CDR sequences as depicted in SEQ ID NOs: 317-319 and 323-325, and wherein the first dose of said inhibitor/antagonist of TNF/TNFR that reduces TNF/TNFR signaling and/or said inhibitor/antagonist of IL6/IL6R that reduces IL6/IL6R signaling according to (b) is administered about 1 day before administration of the antibody construct, particularly wherein said inhibitor/antagonist of TNF/TNFR that reduces TNF/TNFR signaling and/or said inhibitor/antagonist of IL6/IL6R that reduces IL6/IL6R signaling according to (b) is selected from etanercept and/or tocilicumab, wherein said at least one further dose of said inhibitor/antagonist of TNF/TNFR that reduces TNF/TNFR signaling and/or said inhibitor/antagonist of IL6/IL6R that reduces IL6/IL6R signaling according to (b) is administered about 4 days following administration of said antibody construct.

[0737] Item 25: The method of any one of Items 1 to 21, wherein said target antigen is CD33 particularly wherein the antibody construct comprises a first domain that comprises the CDR sequences as depicted in SEQ ID NOs: 317-319 and 323-325, and wherein the first dose of said inhibitor/antagonist of TNF/TNFR that reduces TNF/TNFR signaling is administered about 1 day before administration of the antibody construct, particularly wherein the inhibitor/antagonist of TNF/TNFR that reduces TNF/TNFR signaling (b) is etanercept, wherein said at least one dose of said inhibitor/antagonist of TNF/TNFR that reduces TNF/TNFR signaling (b), particularly etanercept, is administered about 4 days following administration of said antibody construct.

[0738] Item 26: The method of any one of Items 1 to 23, wherein said target antigen is CD33, particularly wherein the antibody construct comprises a first domain that comprises the CDR sequences as depicted in SEQ ID NOs: 317-319 and 323-325, and wherein a first dose of said inhibitor/antagonist of IL6/IL6R that reduces IL6/IL6R signaling is administered before administration of the antibody construct, particularly wherein inhibitor/antagonist of IL6/IL6R that reduces IL6/IL6R signaling (c) is tocilicumab, wherein said dose is administered about 1 hour before administration of the antibody construct, optionally before administration of every dose of antibody construct.

[0739] Item 27: The method of any one of Items 1 to 23, wherein said target antigen is Flt3, particularly wherein the antibody construct comprises a first domain wherein the CDR sequences are as depicted in SEQ ID NOs: 721 to 726, and wherein the first dose of said inhibitor/antagonist of TNF/TNFR that reduces TNF/TNFR signaling (b) is administered about 2 days before administration of the antibody construct, wherein the inhibitor/antagonist of TNF/TNFR that reduces TNF/TNFR signaling (b) is etanercept.

[0740] Item 28: The method of any one of Items 1 to 23, wherein said target antigen is Flt3, wherein the antibody construct comprises a first domain wherein the CDR sequences are as depicted in SEQ ID NOs: 721 to 726, and wherein a first dose of said inhibitor/antagonist of IL6/IL6R that reduces IL6/IL6R signaling is administered before administration of the antibody construct, particularly wherein inhibitor/antagonist of IL6/IL6R that reduces IL6/IL6R signaling (c) is tocilicumab, wherein said dose is administered about 1 hour before administration of the antibody construct, optionally before administration of every dose of antibody construct.

[0741] Item 29: The method of any one of the preceding Items, further comprising administering at least one corticosteroid and/or a non-glucocorticoidal compound.

[0742] Item 30: The method of any one of the preceding Items, wherein said corticostoid is dexamethasone, and/or said non-glucocorticoidal compound is selected from the group comprising natalizumab, PPS, and minocylin.

[0743] Item 31: The method of any one of Items 1 to 30, further comprising the administration of a corticoid compound, particularly dexamethasone, before administration of more that one dose of said antibody construct.

[0744] Item 32: The method of any one of Items 1 to 23 and 29 to 31, wherein the target antigen is CD19 and the cancer is a leukemia, particularly ALL.

[0745] Item 33: The method of any one of Items 1 to 26 and 29 to 32, wherein the target antigen is CD33 and the cancer is a leukemia, particularly AML.

[0746] Item 34: The method of any one of Items 1 to 23 and 27 to 32, wherein the target antigen is Flt3 and the cancer is a leukemia, particularly AML.

[0747] Item 35: The method of any one of Items 1 to 23 and 29 to 31, wherein the target antigen is PSMA and the cancer is a solid tumor, particularly prostate cancer or a cancer originating from a prostate cancer.

[0748] Item 36: The method of any one of Items 1 to 23 and 29 to 31, wherein the target antigen is DLL3 and the cancer is a solid tumor selected from the group consisting of lung cancer, preferably SCLC, breast, cervical, colon, colorectal, endometrial, head and neck, liver, ovarian, pancreatic, prostate, skin, gastric, testis, thyroid, adrenal, renal, bladder, uterine, esophageal, urothelial and brain tumor or cancer, or a lymphoma, carcinoma, and sarcoma, and a metastatic cancer disease derived from any of the foregoing.

[0749] Item 37: The method of any one of Items 1 to 25, 27, and 29 to 36, wherein the inhibitor/antagonist of TNF/TNFR that reduces TNF/TNFR signaling is etanercept, particularly wherein the dosage is administered subcutaneously.

[0750] Item 38: The method of any one of Items 1 to 25, 27, and 29 to 37, wherein the inhibitor/antagonist of TNF/TNFR that reduces TNF/TNFR signaling is etanercept and the dosage is administered subcutaneously at a dose of between 10 mg to 100 mg.

[0751] Item 39: The method of any one of Items 1 to 24, 26, and 29 to 36, wherein the inhibitor/antagonist of IL6/IL6R that reduces IL6/IL6R signaling is tocilizumab, particularly wherein the dosage is administered intravenously.

[0752] Item 40: The method of any one of Items 1 to 24, 26, 29 to 36, and 39, wherein the inhibitor/antagonist of IL6/IL6R that reduces IL6/IL6R signaling is tocilizumab and the dosage is administered intravenously or at 1 mg/kg to 20 mg/kg.

[0753] Item 41: The method of any one of the preceding Items 1 to 40, wherein the adverse event associated with immunotherapy is associated with increased cytokine release of TNF, IL-1, MCP-1, and/or IL-6, and wherein the group of adverse events optionally further comprises a neurological reaction, particularly one or more selected from the group consisting of: confusion, ataxia, disorientation, dysphasia, aphasia, speech impairment, cerebellar symptoms, tremor, apraxia, seizure, grand mal convulsion, palsy, and balance disorder.

[0754] Item 42: The method of any one of the preceding Items 1-41, wherein the domain of said antibody construct that binds to CD3, binds to human CD3 epsilon and to Callithrix jacchus or Saimiri sciureus CD3 epsilon.

[0755] Item 43: The method of any one of the preceding Items 1 to 42, wherein
[0756] a) the antibody construct is a single chain antibody construct,
[0757] b) the first domain is in the format of an scFv,
[0758] c) the second domain is in the format of an scFv,
[0759] d) the first and the second domain are connected via a linker, and/or
[0760] e) the antibody construct comprises a domain providing an extended serum half-life.

[0761] Item 44: The method of any one of the preceding Items 1 to 43, wherein said inhibitor/antagonist of TNF/TNFR that reduces TNF/TNFR signaling and/or said inhibitor/antagonist of IL6/IL6R that reduces IL6/IL6R signaling according to (b), is selected from the group comprising small molecules, biological molecules, antibodies and derivatives thereof, and aptamers.

[0762] Item 45: The method of any one of the preceding Items 1 to 25, 27, 29 to 38, 41 to 44, wherein the inhibitor/antagonist of TNF/TNFR that reduces TNF/TNFR signaling is selected from the group of TNF inhibitors/antagonists comprising etanercept, infliximab, adalimumab, certolizumab Pergol, and golimumab, particularly etanercept.

[0763] Item 46: The method of any one of the preceding Items, wherein said patient is selected from the group of patients at risk of developing adverse events or having an intolerance to at least one of a group comprising corticosteroids, non-glucocorticoidal compounds, IL-6-inhibitors, IL-6R-inhibitors, and/or TNF/TNFR inhibitors different from an inhibitor/antagonist of TNF/TNFR that reduces TNF/TNFR signaling according to Item 45.

[0764] Item 47: The method of any one of the preceding Items, wherein said patient is selected from the group of patients at risk of developing adverse events or having an intolerance to corticosteroids, optionally also wherein the corticosteroid is dexamethasone.

[0765] Item 48: The method of any one of the preceding Items, wherein the step of administering an antibody construct that binds selectively to a target antigen on a cancer cell and to human CD3 on the surface of a T cell is the first exposure of said antibody construct.

[0766] Item 49: The method of any one of the preceding Items 1 to 47, wherein the step of administering an antibody construct that binds selectively to a target antigen on a cancer cell and to human CD3 on the surface of a T cell is a re-exposure of the patient to said antibody construct.

### Definitions

[0767] The term “antibody construct” refers to a molecule in which the structure and/or function is/are based on the structure and/or function of an antibody, e.g., of a full-length immunoglobulin molecule. Hence, an antibody construct immunospecifically binds to its target or antigen, and/or it comprises the heavy chain variable region (VH) and/or the light chain variable region (VL) of an antibody, or comprises domains derived therefrom. An antibody construct used according to the invention comprises the minimum structural requirements of an antibody which allow for immunospecific target binding. This minimum requirement may e.g. be defined by the presence of at least three light chain CDRs (i.e. CDR1, CDR2 and CDR3 of the VL region) and/or three heavy chain CDRs (i.e. CDR1, CDR2 and CDR3 of the VH region), preferably of all six CDRs. An antibody construct may hence be characterized by the presence of three or six CDRs in either one or both binding domains, and the skilled person knows where (in which order) those CDRs are located within the binding domain.

[0768] The definition of “antibody” according to the invention comprises full-length antibodies, also including camelid antibodies and other immunoglobulins generated by biotechnological or protein engineering methods or processes. These full-length antibodies may be for example monoclonal, recombinant, chimeric, deimmunized, humanized and human antibodies, as well as antibodies from other species such as mouse, hamster, rabbit, rat, goat, or non-human primates.

[0769] “Antibody constructs” used in accordance with the present invention may have the structure of a full-length immunoglobulin as it occurs naturally. For example, they may comprise (at least) two full-length antibody heavy chains and two full-length antibody light chains. However, given that the antibody constructs according used in accordance with the invention comprise one domain binding to a target antigen and another domain binding to CD3, they do not occur naturally, and they are markedly different in their function from naturally occurring products. An antibody construct used in accordance with the invention is hence an artificial “hybrid” molecule comprising at least two distinct binding domains with different specificities. It is emphasized that the antibody constructs disclosed herein may comprise more than two domains, e.g., they may comprise two identical or different target antigen binding domains and another domain binding to CD3. The target antigen binding domains may be identical, i.e. bind the same epitope, or they may bind different epitopes of the same of different target antigens.

[0770] “Antibody constructs” used in accordance with the present invention may also comprise fragments of full-length antibodies, such as VH, VHH, VL, (s)dAb, Fv, light chain (VL-CL), Fd (VH-CH1), heavy chain, Fab, Fab′, F(ab′)2 or “r IgG” (“half antibody” consisting of a heavy chain and a light chain). Antibody constructs used in accordance with the invention may also comprise modified fragments of antibodies, also called antibody variants or antibody derivatives. Examples include, but are not limited to, scFv, di-scFv or bi(s)-scFv, scFv-Fc, scFv-zipper, scFab, Fab2, Fab3, diabodies, single chain diabodies, tandem diabodies (Tandab's), tandem di-scFv, tandem tri-scFv, “minibodies” exemplified by a structure which is as follows: (VH-VL-CH3)2, (scFv-CH3)2, ((scFv)2-CH3+CH3), ((scFv)2-CH3) or (scFv-CH3-scFv)2, multibodies such as triabodies or tetrabodies, and single domain antibodies such as nanobodies or single variable domain antibodies comprising merely one variable region, which might be VHH, VH or VL, that specifically binds to an antigen or target independently of other variable regions or domains. Further possible formats of the antibody constructs used in accordance with the invention are cross bodies, maxi bodies, hetero Fc constructs, mono Fc constructs and scFc constructs. Examples for those formats will be described herein below.

[0771] Furthermore, the definition of the term “antibody construct” includes bivalent and polyvalent/multivalent constructs as well as bispecific and polyspecific/multispecific constructs, which specifically bind to two, three or more antigenic structures, through distinct binding domains. An antibody construct can have more binding valences than specificities, e.g. in a case where it has two binding domains for the first target and one binding domain for the second target (CD3), or vice versa, in which case the construct is trivalent and bispecific. In general, the term “bispecific” includes the meaning that an antibody construct binds to (at least) two different antigens, a target antigen and CD3.

[0772] Moreover, the definition of the term “antibody construct” includes molecules consisting of only one polypeptide chain as well as molecules consisting of two, three, four or more polypeptide chains, which chains can be either identical (homodimers, homotrimers or homo oligomers) or different (heterodimer, heterotrimer or heterooligomer) Examples for the above identified antibodies and their fragments, variants, derivatives and antibody constructs derived therefrom are described inter alia in Harlow and Lane, Antibodies: A laboratory manual, CSHL Press (1988); Kontermann and Dübel, Antibody Engineering, Springer, 2nd ed. 2010; and Little, Recombinant Antibodies for Immunotherapy, Cambridge University Press 2009.

[0773] The terms “binding domain” or “domain which binds to . . . ” or “domain” as far as it relates to the herein described “constructs” characterizes in connection with the present invention a domain of the antibody construct which immunospecifically binds to/interacts with/recognizes an epitope on the target or antigen. The structure and function of the first domain (binding to a target antigen), and preferably also the structure and/or function of the second domain (binding to CD3), is/are based on the structure and/or function of an antibody, e.g. of a full-length immunoglobulin molecule. The “binding domain” or “domain which binds to . . . ” may hence comprise the minimum structural requirements of an antibody which allow for immunospecific target binding. This minimum structural requirement of the first domain may e.g. be defined by the presence of at least three light chain CDRs (i.e. CDR1, CDR2 and CDR3 of the VL region) and/or of three heavy chain CDRs (i.e. CDR1, CDR2 and CDR3 of the VH region), preferably of all six CDRs. It is envisaged that the second domain also comprises this minimum structural requirement of an antibody which allow for the immunospecific target binding. More preferably, the second domain also comprises at least three light chain CDRs (i.e. CDR1, CDR2 and CDR3 of the VL region) and/or three heavy chain CDRs (i.e. CDR1, CDR2 and CDR3 of the VH region), preferably all six CDRs. A “domain which binds to” (or a “binding domain”) may typically comprise an antibody light chain variable region (VL) and an antibody heavy chain variable region (VH); however, it does not have to comprise both, but may comprise only one of VH or VL. Fd fragments, for example, often retain some antigen-binding function of the intact antigen-binding domain.

[0774] Examples for the format of a “domain which binds to” (or a “binding domain”) include, but are not limited to, full-length antibodies, fragments of full-length antibodies (such as VH, VHH, VL), (s)dAb, Fv, light chain (VL-CL), Fd (VH-CH1), heavy chain, Fab, Fab′, F(ab′)2 or “r IgG” (“half antibody”)), antibody variants or derivatives such as scFv, di-scFv or bi(s)-scFv, scFv-Fc, scFv-zipper, scFab, Fab2, Fab3, diabodies, single chain diabodies, tandem diabodies (Tandab's), tandem di-scFv, tandem tri-scFv, “minibodies” (selected from formats such as (VH-VL-CH3)2, (scFv-CH3)2, ((scFv)2-CH3+CH3)), ((scFv)2-CH3) or (scFv-CH3-scFv)2, multibodies such as triabodies or tetrabodies, and single domain antibodies such as nanobodies or single variable domain antibodies comprising merely one variable region, which might be VHH, VH or VL. Further examples for the format of a “domain which binds to” (or a “binding domain”) include (1) an antibody fragment or variant comprising VL, VH, CL and CH1 (such as Fab); (2) an antibody fragment or variant comprising two linked Fab fragments (such as a F(ab′)2); (3) an antibody fragment or variant comprising VH and CH1 (such as Fd); (4) an antibody fragment or variant comprising VL and CL (such as the light chain); (5) an antibody fragment or variant comprising VL and VH (such as Fv); (5) a dAb fragment (Ward et al., (1989) Nature 341:544-546), which has a VH domain; (6) an antibody variant comprising at least three isolated CDRs of the heavy and/or the light chain; and (7) a single chain Fv (scFv). Examples for embodiments of antibody constructs or binding domains used in accordance with the invention are e.g. described in WO 00/006605, WO 2005/040220, WO 2008/119567, WO 2010/037838, WO 2013/026837, WO 2013/026833, US 2014/0308285, US 2014/0302037, W 02014/144722, WO 2014/151910, and WO 2015/048272.

[0775] It is envisaged for the antibody construct used in accordance with the present invention that
[0776] the antibody construct is a single chain polypeptide or a single chain antibody construct,
[0777] the first domain is in the format of an scFv,
[0778] the second domain is in the format of an scFv,
[0779] the first and the second domain are connected via a linker, preferably a peptide linker, more preferably a glycine/serine linker, and/or
[0780] the antibody construct comprises at least one domain providing an extended serum half-life, such as an Fc-based domain, which may be located either at the C-terminal or N-terminal end of either the first or the second domain.

[0781] The antibody constructs used in accordance with the present invention are preferably “in vitro generated antibody constructs” and/or “recombinant antibody constructs”. In the context of the present invention, the term “in vitro generated” refers to an antibody construct according to the above definition where all or part of the binding domain or of a variable region (e.g., at least one CDR) is generated in a non-immune cell selection, e.g., in an in vitro phage display, on a protein chip or in any other method in which candidate amino acid sequences can be tested for their ability to bind to an antigen. This term thus preferably excludes sequences generated solely by genomic rearrangement in an immune cell in an animal. It is envisaged that the first and/or second domain of the antibody construct is produced by or obtainable by phage display or library screening methods rather than by grafting CDR sequences from a pre-existing (monoclonal) antibody into a scaffold. A “recombinant antibody construct” is an antibody construct generated or produced using (inter alia) recombinant DNA technology or genetic engineering.

[0782] The antibody constructs used in accordance with the present invention are envisaged to be monoclonal. As used herein, antibodies or antibody constructs that are denominated “monoclonal” (mAb) are obtained from a population of substantially homogeneous antibodies/antibody constructs, i.e., the individual antibodies/antibody constructs comprised in the population are identical (in particular with respect to their amino acid sequence) except for possible naturally occurring mutations and/or post-translational modifications (e.g., isomerizations, amidations) that may be present in minor amounts. Monoclonal antibodies/antibody constructs are highly specific, being directed against a single epitope within the antigen, in contrast to polyclonal antibody preparations which typically include different antibodies directed against different determinants (or epitopes). In addition to their specificity, monoclonal antibodies are advantageous in that they are synthesized by the hybridoma culture, hence uncontaminated by other immunoglobulins. The modifier “monoclonal” indicates the character of the antibody/antibody construct as being obtained from a substantially homogeneous population of antibodies and is not to be construed as requiring production of the antibody by any specific method.

[0783] For the preparation of monoclonal antibodies, any technique providing antibodies produced by continuous cell line cultures can be used. For example, monoclonal antibodies to be used may be made by the hybridoma method first described by Koehler et al., Nature, 256: 495 (1975), or may be made by recombinant DNA methods (see, e.g., U.S. Pat. No. 4,816,567). Examples for further techniques to produce human monoclonal antibodies include the trioma technique, the human B-cell hybridoma technique (Kozbor, Immunology Today 4 (1983), 72) and the EBV-hybridoma technique (Cole et al., Monoclonal Antibodies and Cancer Therapy, Alan R. Liss, Inc. (1985), 77-96).

[0784] Hybridomas can then be screened using standard methods, such as enzyme-linked immunosorbent assay (ELISA) and surface plasmon resonance (BIACORE™) analysis, to identify one or more hybridomas that produce an antibody that immunospecifically binds to a specified antigen. Any form of the relevant antigen may be used as the immunogen, e.g., recombinant antigen, naturally occurring forms, any variants or fragments thereof, as well as an antigenic peptide thereof. Surface plasmon resonance as employed in the BIAcore™ system can be used to increase the efficiency of phage antibodies/antibody constructs which bind to an epitope of a target antigen (Schier, Human Antibodies Hybridomas 7 (1996), 97-105; Malmborg, J. Immunol. Methods 183 (1995), 7-13).

[0785] Another exemplary method of making antibody constructs or binding domains includes screening protein expression libraries, e.g., phage display or ribosome display libraries. Phage display is described, for example, in Ladner et al., U.S. Pat. No. 5,223,409; Smith (1985) Science 228:1315-1317, Clackson et al., Nature, 352: 624-628 (1991) and Marks et al., J. Mol. Biol., 222: 581-597 (1991).

[0786] In addition to the use of display libraries, the relevant antigen can be used to immunize a non-human animal, e.g., a rodent (such as a mouse, hamster, rabbit or rat). In one embodiment, the non-human animal includes at least a part of a human immunoglobulin gene. For example, it is possible to engineer mouse strains deficient in mouse antibody production with large fragments of the human Ig (immunoglobulin) loci. Using the hybridoma technology, antigen-specific monoclonal antibodies derived from the genes with the desired specificity may be produced and selected. See, e.g., Xenomouse™, Green et al. (1994) Nature Genetics 7:13-21, US 2003-0070185, WO 96/34096, and WO 96/33735.

[0787] A monoclonal antibody can also be obtained from a non-human animal, and then modified, e.g., humanized, deimmunized, rendered chimeric etc., using recombinant DNA techniques known in the art. Examples of modified antibody constructs or binding domains include humanized variants of non-human antibodies/antibody constructs, “affinity matured” antibody constructs or binding domains (see, e.g. Hawkins et al. J. Mol. Biol. 254, 889-896 (1992) and Lowman et al., Biochemistry 30, 10832-10837 (1991)) and antibody variants or mutants with altered effector function(s) (see, e.g., U.S. Pat. No. 5,648,260, Kontermann and Dübel (2010), loc. cit. and Little (2009), loc. cit.).

[0788] In immunology, affinity maturation is the process by which B cells produce antibodies with increased affinity for antigen during the course of an immune response. With repeated exposures to the same antigen, a host will produce antibodies of successively greater affinities. Like the natural prototype, the in vitro affinity maturation is based on the principles of mutation and selection. The in vitro affinity maturation has successfully been used to optimize antibodies, antibody fragments, antibody variants, antibody constructs or binding domains. Random mutations inside the CDRs are introduced using radiation, chemical mutagens or error-prone PCR. In addition, the genetic diversity can be increased by chain shuffling. Two or three rounds of mutation and selection using display methods like phage display usually results in antibodies, antibody fragments, antibody variants, antibody constructs or binding domains with affinities in the low nanomolar range.

[0789] A preferred type of an amino acid substitutional variation of the antibody constructs or binding domains used in accordance with the invention involves substituting one or more residues within the hypervariable region of a parent antibody structure (e.g. a humanized or human antibody structure). Generally, the resulting variant(s) selected for further development will have improved biological properties relative to the parent antibody structure from which they are generated. A convenient way for generating such substitutional variants involves affinity maturation using phage display. Briefly, several sites of the hypervariable region (e. g. 6-7 sites) are mutated to generate all possible amino acid substitutions at each site. The variants thus generated are displayed in a monovalent fashion from filamentous phage particles as fusions to the gene III product of M13 packaged within each particle. The phage-displayed variants are then screened for their biological activity (e.g. binding affinity) as disclosed herein. To identify candidate hypervariable region sites contributing significantly to antigen binding (candidates for modification), alanine scanning mutagenesis can also be performed. Alternatively, or additionally, it may be beneficial to analyze a crystal structure of the complex between the antigen and the antibody construct or the binding domain to identify contact points between the binding domain and its specific antigen. Such contact residues and neighbouring residues are candidates for substitution according to the techniques elaborated herein. Once such variants are generated, the panel of variants is subjected to screening as described herein and antibodies, their antigen-binding fragments, antibody constructs or binding domains with superior properties in one or more relevant assays may be selected for further development.

[0790] The antibody constructs and binding domains used in accordance with the present invention specifically include “chimeric” versions in which a portion of the heavy and/or light chain is identical with or homologous to corresponding sequences in antibodies derived from a particular species or belonging to a particular antibody class or subclass, while the remainder of the chain(s) is/are identical with or homologous to corresponding sequences in antibodies derived from another species or belonging to another antibody class or subclass, as well as fragments or variants of such antibodies, so long as they exhibit the desired biological activity (U.S. Pat. No. 4,816,567; Morrison et al., Proc. Natl. Acad. Sci. USA, 81: 6851-6855 (1984)). Chimeric antibody constructs or binding domains of interest herein include “primitized” antibody constructs comprising variable domain antigen-binding sequences derived from a non-human primate (e.g., Old World Monkey, Ape etc.) and human constant region sequences. A variety of approaches for making chimeric antibodies or antibody constructs have been described. See e.g., Morrison et al., Proc. Natl. Acad. ScL U.S.A. 81:6851, 1985; Takeda et al., Nature 314:452, 1985, Cabilly et al., U.S. Pat. No. 4,816,567; Boss et al., U.S. Pat. No. 4,816,397; Tanaguchi et al., EP 0171496; EP 0173494; and GB 2177096.

[0791] An antibody, antibody construct, antibody fragment, antibody variant or binding domain may also be modified by specific deletion of human T cell epitopes (a method called “deimmunization”) using methods disclosed for example in WO 98/52976 or WO 00/34317. Briefly, the heavy and light chain variable regions of an antibody, antibody construct or binding domain can be analyzed for peptides that bind to MHC class II; these peptides represent potential T cell epitopes (as defined e.g. in WO 98/52976 and WO 00/34317). For detection of potential T cell epitopes, a computer modeling approach termed “peptide threading” can be applied, and in addition a database of human MHC class II binding peptides can be searched for motifs present in the VH and VL sequences, as described in WO 98/52976 and WO 00/34317. These motifs bind to any of the 18 major MHC class II DR allotypes, and thus constitute potential T cell epitopes. Potential T cell epitopes detected can be eliminated by substituting small numbers of amino acid residues in the variable domains or variable regions, or preferably, by single amino acid substitutions. Typically, conservative substitutions are made. Often, but not exclusively, an amino acid common to a position in human germline antibody sequences may be used. Human germline sequences are disclosed e.g. in Tomlinson, et al. (1992) J. MoI. Biol. 227:776-798; Cook, G. P. et al. (1995) Immunol. Today Vol. 16 (5): 237-242; and Tomlinson et al. (1995) EMBO J. 14: 14:4628-4638. The V BASE directory (www2.mrc-lmb.cam.ac.uk/vbase/list2.php) provides a comprehensive directory of human immunoglobulin variable region sequences (compiled by Tomlinson, L A. et al. MRC Centre for Protein Engineering, Cambridge, UK). These sequences can be used as a source of human sequence, e.g., for framework regions and CDRs. Consensus human framework regions can also be used, for example as described in U.S. Pat. No. 6,300,064.

[0792] “Humanized” antibodies, variants or fragments thereof, antibody constructs and binding domains are based on immunoglobulins of mostly human sequences, which contain (a) minimal sequence(s) derived from non-human immunoglobulin. For the most part, humanized antibodies, variants or fragments thereof, antibody constructs and binding domains are based on human immunoglobulins (recipient antibodies) in which residues from a hypervariable region or CDR are replaced by residues from a hypervariable region or CDR of a non-human species (donor antibody) such as a rodent (e.g. mouse, hamster, rat or rabbit) having the desired specificity, affinity, capacity and/or biological activity. In some instances, Fv framework region (FR) residues of the human immunoglobulin are replaced by corresponding non-human residues. Furthermore, “humanized” antibodies, variants or fragments thereof, antibody constructs and binding domains as used herein may also comprise residues which are found neither in the recipient antibody nor the donor antibody. These modifications are made to further refine and optimize antibody performance. The humanized antibodies, variants or fragments thereof, antibody constructs and binding domains may also comprise at least a portion of an immunoglobulin constant region (such as Fc), typically that of a human immunoglobulin. For further details, see Jones et al., Nature, 321: 522-525 (1986); Reichmann et al., Nature, 332: 323-329 (1988); and Presta, Curr. Op. Struct. Biol., 2: 593-596 (1992).

[0793] Humanized antibodies, variants or fragments thereof, antibody constructs and binding domains can be generated by replacing sequences of the (Fv) variable region that are not directly involved in antigen binding with equivalent sequences from human (Fv) variable regions. Exemplary methods for generating such molecules are provided by Morrison (1985) Science 229:1202-1207; by Oi et al. (1986) BioTechniques 4:214; and by U.S. Pat. Nos. 5,585,089; 5,693,761; 5,693,762; 5,859,205; and 6,407,213. These methods include isolating, manipulating, and expressing the nucleic acid sequences that encode all or part of immunoglobulin (Fv) variable regions from at least one of a heavy or light chain. Such nucleic acids may be obtained from a hybridoma producing an antibody against a predetermined target, as described above, as well as from other sources. The recombinant DNA encoding the humanized antibody, variant or fragment thereof, antibody construct or binding domain can then be cloned into an appropriate expression vector.

[0794] Humanized antibodies, variants or fragments thereof, antibody constructs and binding domains may also be produced using transgenic animals such as mice that express human heavy and light chain genes but are incapable of expressing the endogenous mouse immunoglobulin heavy and light chain genes. Winter describes an exemplary CDR grafting method that may be used to prepare the humanized molecules described herein (U.S. Pat. No. 5,225,539). All the CDRs of a given human sequence may be replaced with at least a portion of a non-human CDR, or only some of the CDRs may be replaced with non-human CDRs. It is only necessary to replace the number of CDRs required for binding of the humanized molecule to a predetermined antigen.

[0795] A humanized antibody, variant or fragment thereof, antibody construct or binding domain can be optimized by the introduction of conservative substitutions, consensus sequence substitutions, germline substitutions and/or back mutations. Such altered immunoglobulin molecules can be made by any of several techniques known in the art, (e.g., Teng et al., Proc. Natl. Acad. Sci. U.S.A., 80: 7308-7312, 1983; Kozbor et al., Immunology Today, 4: 7279, 1983; Olsson et al., Meth. Enzymol., 92: 3-16, 1982, and EP 239 400).

[0796] Human anti-mouse antibody (HAMA) responses have led the industry to prepare chimeric or otherwise humanized antibodies/antibody constructs. It is however expected that certain human anti-chimeric antibody (HACA) responses will be observed, particularly in chronic or multi-dose utilizations of an antibody or antibody construct. Thus, it would be desirable to provide antibody constructs comprising a human binding domain against a target antigen and/or a human binding domain against CD3, in order to vitiate concerns and/or effects of HAMA or HACA response.

[0797] Therefore, according to one embodiment, the antibody construct, the first binding domain and/or the second binding domain are “human”. The term “human antibody”, “human antibody construct” and “human binding domain” includes antibodies, antibody constructs and binding domains, respectively, having antibody-derived regions such as variable and constant regions or domains which correspond substantially to human germline immunoglobulin sequences known in the art, including, for example, those described by Kabat et al. (1991) (loc. cit.). The human antibody constructs or binding domains used in accordance with the invention may include amino acid residues not encoded by human germline immunoglobulin sequences (e.g., mutations introduced by random or site-specific mutagenesis in vitro or by somatic mutation in vivo), for example in the CDRs, and particularly in CDR3. The human antibody constructs or binding domains can have at least one, two, three, four, five, or more positions replaced with an amino acid residue that is not encoded by the human germline immunoglobulin sequence. The definition of human antibodies, antibody constructs and binding domains as used herein also contemplates fully human antibodies, antibody constructs and binding domains which include only non-artificially and/or genetically altered human sequences of antibodies as those can be derived by using technologies or systems such as the Xenomouse.

[0798] Antibody constructs comprising at least one human binding domain avoid some of the problems associated with antibodies or antibody constructs that possess non-human such as rodent (e.g. murine, rat, hamster or rabbit) variable and/or constant regions. The presence of such rodent derived proteins can lead to the rapid clearance of the antibodies or antibody constructs or can lead to the generation of an immune response against the antibody or antibody construct by a patient. To avoid the use of rodent-derived antibody constructs, humanized or fully human antibody constructs can be generated through the introduction of human antibody functions into a rodent so that the rodent produces fully human antibodies.

[0799] The ability to clone and reconstruct megabase-sized human loci in YACs and to introduce them into the mouse germline provides a powerful approach to elucidating the functional components of very large or crudely mapped loci as well as generating useful models of human disease. Furthermore, the use of such technology for substitution of mouse loci with their human equivalents could provide unique insights into the expression and regulation of human gene products during development, their communication with other systems, and their involvement in disease induction and progression.

[0800] An important practical application of such a strategy is the “humanization” of the mouse humoral immune system. Introduction of human immunoglobulin (Ig) loci into mice in which the endogenous Ig genes have been inactivated offers the opportunity to study the mechanisms underlying programmed expression and assembly of antibodies as well as their role in B-cell development. Furthermore, such a strategy could provide an ideal source for production of fully human monoclonal antibodies (mAbs)—an important milestone towards fulfilling the promise of antibody therapy in human disease. Fully human antibodies or antibody constructs derived therefrom are expected to minimize the immunogenic and allergic responses intrinsic to mouse or mouse-derivatized mAbs and thus to increase the efficacy and safety of the administered antibodies/antibody constructs. The use of fully human antibodies or antibody constructs can be expected to provide a substantial advantage in the treatment of chronic and recurring human diseases, such as inflammation, autoimmunity, and cancer, which require repeated compound administrations.

[0801] One approach towards this goal was to engineer mouse strains deficient in mouse antibody production with large fragments of the human Ig loci in anticipation that such mice would produce a large repertoire of human antibodies in the absence of mouse antibodies. Large human Ig fragments would preserve the large variable gene diversity as well as the proper regulation of antibody production and expression. By exploiting the mouse machinery for antibody diversification and selection and the lack of immunological tolerance to human proteins, the reproduced human antibody repertoire in these mouse strains should yield high affinity antibodies against any antigen of interest, including human antigens. Using the hybridoma technology, antigen-specific human mAbs with the desired specificity could be readily produced and selected. This general strategy was demonstrated in connection with the generation of the first XenoMouse mouse strains (see Green et al. Nature Genetics 7:13-21 (1994)). The XenoMouse strains were engineered with yeast artificial chromosomes (YACs) containing 245 kb and 190 kb-sized germline configuration fragments of the human heavy chain locus and kappa light chain locus, respectively, which contained core variable and constant region sequences. The human Ig containing YACs proved to be compatible with the mouse system for both rearrangement and expression of antibodies and were capable of substituting for the inactivated mouse Ig genes. This was demonstrated by their ability to induce B cell development, to produce an adult-like human repertoire of fully human antibodies, and to generate antigen-specific human mAbs. These results also suggested that introduction of larger portions of the human Ig loci containing greater numbers of V genes, additional regulatory elements, and human Ig constant regions might recapitulate substantially the full repertoire that is characteristic of the human humoral response to infection and immunization. The work of Green et al. was extended to the introduction of greater than approximately 80% of the human antibody repertoire through introduction of megabase sized, germline configuration YAC fragments of the human heavy chain loci and kappa light chain loci, respectively. See Mendez et al. Nature Genetics 15:146-156 (1997) and U.S. patent application Ser. No. 08/759,620.

[0802] The production of the XenoMouse model is further discussed and delineated in U.S. patent application Ser. No. 07/466,008, Ser. No. 07/610,515, Ser. No. 07/919,297, Ser. No. 07/922,649, Ser. No. 08/031,801, Ser. No. 08/112,848, Ser. No. 08/234,145, Ser. No. 08/376,279, Ser. No. 08/430,938, Ser. No. 08/464,584, Ser. No. 08/464,582, Ser. No. 08/463,191, Ser. No. 08/462,837, Ser. No. 08/486,853, Ser. No. 08/486,857, Ser. No. 08/486,859, Ser. No. 08/462,513, Ser. No. 08/724,752, and Ser. No. 08/759,620; and U.S. Pat. Nos. 6,162,963; 6,150,584; 6,114,598; 6,075,181, and 5,939,598 and Japanese Patent Nos. 3 068 180 B2, 3 068 506 B2, and 3 068 507 B2. See also Mendez et al. Nature Genetics 15:146-156 (1997) and Green and Jakobovits J. Exp. Med. 188:483-495 (1998), EP 0 463 151 B1, WO 94/02602, WO 96/34096, WO 98/24893, WO 00/76310, and WO 03/47336.

[0803] In an alternative approach, others, including GenPharm International, Inc., have utilized a “minilocus” approach. In the minilocus approach, an exogenous Ig locus is mimicked through the inclusion of pieces (individual genes) from the Ig locus. Thus, one or more VH genes, one or more DH genes, one or more JH genes, a mu constant region, and a second constant region (preferably a gamma constant region) are formed into a construct for insertion into an animal. This approach is described in U.S. Pat. No. 5,545,807 to Surani et al. and U.S. Pat. Nos. 5,545,806; 5,625,825; 5,625,126; 5,633,425; 5,661,016; 5,770,429; 5,789,650; 5,814,318; 5,877,397; 5,874,299; and 6,255,458 each to Lonberg and Kay, U.S. Pat. Nos. 5,591,669 and 6,023,010 to Krimpenfort and Berns, U.S. Pat. Nos. 5,612,205; 5,721,367; and U.S. Pat. No. 5,789,215 to Berns et al., and U.S. Pat. No. 5,643,763 to Choi and Dunn, and GenPharm International U.S. patent application Ser. No. 07/574,748, Ser. No. 07/575,962, Ser. No. 07/810,279, Ser. No. 07/853,408, Ser. No. 07/904,068, Ser. No. 07/990,860, Ser. No. 08/053,131, Ser. No. 08/096,762, Ser. No. 08/155,301, Ser. No. 08/161,739, Ser. No. 08/165,699, Ser. No. 08/209,741. See also EP 0 546 073 B1, WO 92/03918, WO 92/22645, WO 92/22647, WO 92/22670, WO 93/12227, WO 94/00569, WO 94/25585, WO 96/14436, WO 97/13852, and WO 98/24884 and U.S. Pat. No. 5,981,175. See further Taylor et al. (1992), Chen et al. (1993), Tuaillon et al. (1993), Choi et al. (1993), Lonberg et al. (1994), Taylor et al. (1994), and Tuaillon et al. (1995), Fishwild et al. (1996).

[0804] Kirin has also demonstrated the generation of human antibodies from mice in which, through microcell fusion, large pieces of chromosomes, or entire chromosomes, have been introduced. See European Patent Application Nos. 773 288 and 843 961. Xenerex Biosciences is developing a technology for the potential generation of human antibodies. In this technology, SCID mice are reconstituted with human lymphatic cells, e.g., B and/or T cells. Mice are then immunized with an antigen and can generate an immune response against the antigen. See U.S. Pat. Nos. 5,476,996; 5,698,767; and 5,958,765.

[0805] In some embodiments, the antibody constructs used in accordance with the invention are “isolated” or “substantially pure” antibody constructs. “Isolated” or “substantially pure”, when used to describe the antibody constructs disclosed herein, means an antibody construct that has been identified, separated and/or recovered from a component of its production environment. Preferably, the antibody construct is free or substantially free of association with all other components from its production environment. Contaminant components of its production environment, such as that resulting from recombinant transfected cells, are materials that could interfere with diagnostic or therapeutic uses for the antibody construct, and may include enzymes, hormones, and other proteinaceous or non-proteinaceous compounds. It is understood that the isolated or substantially pure antibody construct may constitute from 5% to 99.9% by weight of the total protein/polypeptide content in a given sample, depending on the circumstances. The desired antibody construct may be produced at a significantly higher concentration using an inducible promoter or high expression promoter. The definition includes the production of an antibody construct in a wide variety of organisms and/or host cells that are known in the art. In certain embodiments, the antibody construct will be purified (1) to a degree enough to obtain at least 15 residues of N-terminal or internal amino acid sequence by use of a spinning cup sequenator, or (2) to homogeneity by SDS-PAGE under non-reducing or reducing conditions using Coomassie Blue or, preferably, silver staining. Usually, however, an isolated antibody construct will be prepared by at least one purification step.

[0806] According to one embodiment, the entire antibody construct and/or the binding domains are in the form of one or more polypeptides or in the form of proteins. In addition to proteinaceous parts, such polypeptides or proteins may include non-proteinaceous parts (e.g. chemical linkers or chemical crosslinking agents such as glutaraldehyde).

[0807] Peptides are short chains of amino acid monomers linked by covalent peptide (amide) bonds. Hence, peptides fall under the broad chemical classes of biological oligomers and polymers. Amino acids that are part of a peptide or polypeptide chain are termed “residues” and can be consecutively numbered. All peptides except cyclic peptides have an N-terminal residue at one end and a C-terminal residue at the other end of the peptide. An oligopeptide consists of only a few amino acids (usually between two and twenty). A polypeptide is a longer, continuous, and unbranched peptide chain. Peptides are distinguished from proteins on the basis of size, and as an arbitrary benchmark can be understood to contain approximately 50 or fewer amino acids. Proteins consist of one or more polypeptides, usually arranged in a biologically functional way. While aspects of the lab techniques applied to peptides versus polypeptides and proteins differ (e.g., the specifics of electrophoresis, chromatography, etc.), the size boundaries that distinguish peptides from polypeptides and proteins are not absolute. Therefore, in the context of the present invention, the terms “peptide”, “polypeptide” and “protein” may be used interchangeably, and the term “polypeptide” is often preferred.

[0808] Polypeptides may further form multimers such as dimers, trimers and higher oligomers, which consist of more than one polypeptide molecule. Polypeptide molecules forming such dimers, trimers etc. may be identical or non-identical. The corresponding structures of higher order of such multimers are, consequently, termed homo- or heterodimers, homo- or heterotrimers etc. An example for a hereteromultimer is an antibody or immunoglobulin molecule, which, in its naturally occurring form, consists of two identical light polypeptide chains and two identical heavy polypeptide chains. The terms “peptide”, “polypeptide” and “protein” also refer to naturally modified peptides/polypeptides/proteins wherein the modification is accomplished e.g. by post-translational modifications like glycosylation, acetylation, phosphorylation and the like. A “peptide”, “polypeptide” or “protein” when referred to herein may also be chemically modified such as pegylated. Such modifications are well known in the art and described herein below.

[0809] The terms “selectively binds to”, “(specifically or immunospecifically) binds to”, “(specifically or immunospecifically) recognizes”, or “(specifically or immunospecifically) reacts with” mean in accordance with this invention that an antibody construct or a binding domain interacts or (immuno-)specifically interacts with a given epitope on the target molecule (antigen) and CD3, respectively. This interaction or association occurs more frequently, more rapidly, with greater duration, with greater affinity, or with some combination of these parameters, to an epitope on the specific target than to alternative substances (non-target molecules). Because of the sequence similarity between homologous proteins in different species, an antibody construct or a binding domain that immunspecifically binds to its target (such as a human target) may, however, cross-react with homologous target molecules from different species (such as, from non-human primates). The term “specific/immunospecific binding” can hence include the binding of an antibody construct or binding domain to epitopes or structurally related epitopes in more than one species.

[0810] In the context of the present invention, the term “epitope” refers to the part or region of the antigen that is recognized/immunospecifically recognized by the binding domain. An “epitope” is antigenic, and thus the term epitope is sometimes also referred to as “antigenic structure” or “antigenic determinant”. The part of the binding domain that binds to the epitope is called a paratope. Specific binding is believed to be accomplished by specific motifs in the amino acid sequence of the binding domain and the antigen. Thus, binding is achieved because of their primary, secondary and/or tertiary structure as well as the result of potential secondary modifications of said structures. The specific interaction of the paratope with its antigenic determinant may result in a simple binding of said site to the antigen. In some cases, the specific interaction may alternatively or additionally result in the initiation of a signal, e.g. due to the induction of a change of the conformation of the antigen, an oligomerization of the antigen, etc.

[0811] The epitopes of protein antigens are divided into two categories, conformational epitopes and linear epitopes, based on their structure and interaction with the paratope. A conformational epitope is composed of discontinuous sections of the antigen's amino acid sequence. These epitopes interact with the paratope based on the three-dimensional surface features and shape or tertiary structure (folding) of the antigen. Methods of determining the conformation of epitopes include, but are not limited to, x-ray crystallography, two-dimensional nuclear magnetic resonance (2D-NMR) spectroscopy and site-directed spin labelling and electron paramagnetic resonance (EPR) spectroscopy. By contrast, linear epitopes interact with the paratope based on their primary structure. A linear epitope is formed by a continuous sequence of amino acids from the antigen and typically includes at least 3 or at least 4, and more usually, at least 5 or at least 6 or at least 7, for example, about 8 to about 10 amino acids in a unique sequence.

[0812] A method for epitope mapping is described in the following: A pre-defined region (a contiguous amino acid stretch) within the target protein is exchanged/replaced, preferably with a corresponding region, of a different or even a similar (e.g., a homologous) non-target antigen peptide fragment provided that the binding domain is not cross-reactive with the non-target antigen peptide fragment. These chimeras are expressed on the surface of host cells (such as CHO cells). Binding of the antibody or antibody construct can be tested via FACS analysis. When the binding of the antibody or antibody construct to the chimeric molecule is entirely abolished, or when a significant binding decrease is observed, it can be concluded that the region of the target antigen which was removed from this chimeric molecule is relevant for the immunospecific epitope-paratope recognition. Said decrease in binding is preferably at least 10%, 20%, 30%, 40%, or 50%; more preferably at least 60%, 70%, or 80%, and most preferably 90%, 95% or even 100% in comparison to the binding to the non-modified (wild-type) target antigen, which is set to be 100%. Alternatively, the above described epitope mapping analysis can be modified by introducing one or multiple point mutations into the sequence of the target antigen. These point mutations can e.g. reflect the differences between the target antigen and a similar (e.g., a homologous) polypeptide.

[0813] A further method to determine the contribution of a specific residue of a target antigen to the recognition by an antibody construct or binding domain is alanine scanning (see e.g. Morrison K L & Weiss G A. Curr Opin Chem Biol. 2001 June; 5(3):302-7), where each residue to be analyzed is replaced by alanine, e.g. via site-directed mutagenesis. Alanine is used because of its non-bulky, chemically inert, methyl functional group that nevertheless mimics the secondary structure references that many of the other amino acids possess. Sometimes bulky amino acids such as valine or leucine can be used in cases where conservation of the size of mutated residues is desired.

[0814] The interaction between the binding domain and the epitope of the target antigen implies that a binding domain exhibits appreciable or significant affinity for the epitope/the target antigen and, generally, does not exhibit significant affinity for proteins or antigens other than the target antigen— notwithstanding the above discussed cross-reactivity with homologous targets e.g. from other species. “Significant affinity” includes binding with an affinity (dissociation constant, KD) of ≤10-6 M. Preferably, binding is considered specific when the binding affinity is ≤10-7 M, ≤10-8 M, ≤10-9 M, ≤10-10 M, or even ≤10-11 M, or ≤10-12 M. Whether a binding domain (immuno-)specifically reacts with or binds to a target can be tested readily e.g. by comparing the affinity of said binding domain to its desired target protein or antigen with the affinity of said binding domain to non-target proteins or antigens. Preferably, an antibody construct used in accordance with the invention does not significantly bind to proteins or antigens other than target antigen(s) or CD3, respectively—unless any further binding domain(s) directed against a further target is/are deliberately introduced into the antibody construct used in accordance with the invention, in which case the binding of that binding domain to its specific target is also provided by the present invention.

[0815] It is envisaged that the affinity of the first domain for the target antigen(s) is ≤100 nM, ≤90 nM, ≤80 nM, ≤70 nM, ≤60 nM, ≤50 nM, ≤40 nM, ≤30 nM, or ≤20 nM. These values are preferably measured in a cell-based assay, such as a Scatchard assay. See Example 4. Other methods of determining the affinity are also well-known. It is furthermore envisaged that the affinity of the second domain for CD3 (e.g. CD3, preferably human CD3) is ≤100 nM, ≤90 nM, ≤80 nM, ≤70 nM, ≤60 nM, ≤50 nM, ≤40 nM, ≤30 nM, ≤20 nM, or ≤10 nM. These values are preferably measured in a surface plasmon resonance assay, such as a Biacore assay.

[0816] The term “does not significantly bind” means that an antibody construct or binding domain used in accordance with the present invention does not bind to a protein or antigen other than the target antigen(s) or CD3, when said protein or antigen is expressed on the surface of a cell. The antibody construct hence shows reactivity of ≤30%, preferably ≤20%, more preferably ≤10%, particularly preferably ≤9%, ≤8%, ≤7%, ≤6%, ≤5%, ≤4%, ≤3%, ≤2%, or ≤1% with proteins or antigens other than the target antigen(s) or CD3 (when said proteins or antigens are expressed on the surface of a cell), whereby binding to the target antigen(s) or CD3, respectively, is set to be 100%. The “reactivity” can e.g. be expressed in an affinity value (see above).

[0817] It is envisaged that the antibody construct used in accordance with the invention (and more specifically its first domain) does not bind or does not significantly bind to the target antigen(s) homologues, more specifically to human the target antigen(s) homologues and/or to macaque/cyno the target antigen(s) homologues. It is also envisaged that the antibody construct does not bind or does not significantly bind to (human or macaque/cyno) the target antigen(s) homologues on the surface of a target cell. It is hence envisaged that the first domain of the antibody construct used in accordance with the invention does not bind or does not significantly bind to similar, but different (e.g., homologous) antigen(s), preferably on the surface of a target cell.

[0818] The first domain of the antibody construct used in accordance with the invention binds to the target antigen(s) on the surface of a target cell. The “target cell” can be any prokaryotic or eukaryotic cell expressing the target antigen(s) on its surface; preferably the target cell is a cell that is part of the human or animal body, such as a specific the target antigen(s)-expressing cancer or tumor cell or a cell of target antigen-positive neoplasm. The first domain may hence bind to the target antigen(s) expressed by naturally expressing cells or cell lines (such as human cancer lines), and/or by cells or cell lines transformed or (stably/transiently) transfected with nucleic acids encoding the target antigen(s). In one embodiment, the first domain binds to the target antigen(s) is used as a target molecule in a cell-based binding assay such as Scatchard. It is furthermore envisaged that the antibody construct/its first domain binds to human the target antigen(s) on the surface of a target cell. In this connection, the term “target antigen” relates to a molecular structure, e.g. a protein or a part thereof that is specifically recognized on a target cell. The target may be a tumor antigen, a neo antigen, an antigen that is usually not found on a differentiated cell, e.g. a protein that is a characteristic marker for a cancer cell, a neoplastic cell, or a cell that expresses an antigen that is foreign to the host body, e.g. a viral or bacterial antigen, for example an oncoviral antigen that is associated with an infection of a cell by an oncovirus, which is the causative agent for the proliferation of an infected cell by cell division, wherein the cell would normally, under non-infected conditions, no longer or not at all, proliferate, e.g., cells infected by oncogenic viruses, such as human papillomaviruses, hepatitis viruses, etc., that proliferate and give rise to neoplastic tissues.

[0819] Whether or not an antibody, antibody construct or binding domain binds to the same epitope of the target antigen(s) on the surface of a target cell as another given antibody, antibody construct or binding domain can be measured by different analyses as described herein, e.g. by epitope mapping with chimeric or mutated target antigen molecules, as described herein above. Other methods of determining epitopes are described herein, such as alanine scanning.

[0820] Whether or not an antibody or antibody construct competes for binding to an antigen on the surface of a target cell with another given antibody or antibody construct can be measured in a competition assay such as a competitive ELISA. Avidin-coupled microparticles (beads) can also be used. Similarly, to an avidin-coated ELISA plate, when reacted with a biotinylated protein, each of these beads can be used as a substrate on which an assay can be performed. Antigen is coated onto a bead and then precoated with the first antibody. The second antibody is added, and any additional binding is determined. Read-out occurs via flow cytometry. Preferably a cell-based competition assay is used, using either cells that naturally express the target antigen(s) or cells that were stably or transiently transformed with nucleic acids encoding the target antigen(s). The term “competes for binding”, in the present context, means that competition occurs between the two tested antibodies of at least 20%, at least 30%, at least 40%, at least 50%, at least 60%, at least 70%, at least 80% or at least 90%, as determined by any one of the assays disclosed above, preferably the cell-based assay. The same analysis can of course be applied for other targets such as CD3.

[0821] Competitive antibody binding assays include assays determining the competitive binding of two antibodies/antibody constructs to a cell surface bound antigen. Common methods aim to detect binding of two antibodies/antibody constructs, A and B, to the same antigen on the surface of a cell may include steps of: blocking of the cell surface antigen by pre-incubation of cells with antibody/antibody construct A followed by a sub-maximal addition of labeled antibody/antibody construct B and detecting the binding of B compared with binding in the absence of A; titration (i.e. adding different amounts) of antibody/antibody construct A in the presence of sub-maximal amounts of labeled antibody/antibody construct B and detecting the effect on binding of B; or co-titration of A and B, wherein both antibodies/antibody constructs are incubated together at maximal concentration and detecting whether the total binding equals or exceeds that of either A or B alone, i.e. a method which cannot be affected by the order of addition or relative amounts of the antibodies/antibody constructs.

[0822] When two antibodies/antibody constructs A and B compete for a cell surface bound antigen, the antibodies will very often compete in blocking assays independently from the order of the addition of the antibodies. In other words, competition is detected if the assay is carried out in either direction. However, this is not always the case, and under certain circumstances the order of the addition of the antibodies or the direction of the assay may influence the signal generated. This may be due to differences in affinities or avidities of the potentially competing antibodies/antibody constructs. If the order of the addition has a significant effect on the signal generated, it is concluded that the two antibodies/antibody constructs do compete if competition is detected in at least one order.

[0823] In the context of the present invention, the term “variable” refers to those portions of antibody or immunoglobulin domains that exhibit variability in their sequence and that are involved in determining the specificity and binding affinity of a particular antibody (i.e., the “variable region(s)”). Usually, the pairing of a heavy chain variable region (VH) and a light chain variable region (VL) together forms a single antigen-binding site.

[0824] Variability is not evenly distributed throughout the variable regions of antibodies; it is concentrated in sub-domains of each of the heavy and light chain variable regions. These sub-domains are called “hypervariable regions” or “complementarity determining regions” (CDRs). The more conserved (i.e., non-hypervariable) portions of the variable regions are called the “framework” (FR) regions and provide a scaffold for the six CDRs in three-dimensional space to form an antigen-binding surface. The variable regions of naturally occurring antibody heavy and light chains each comprise four FR regions (FR1, FR2, FR3, and FR4), largely adopting a β-sheet configuration. Together with the CDRs, they form the following sequence within a variable heavy or light chain: FR1-CDR1-FR2-CDR2-FR3-CDR3-FR4. The hypervariable regions in each chain are held together in proximity by the framework regions and, usually together with the hypervariable regions from the other chain, contribute to the formation of the antigen-binding site (see Kabat et al., loc. cit.).

[0825] The terms “CDR”, and its plural “CDRs”, refer to the complementarity determining region of which three make up the binding character of a light chain variable region (CDR-L1, CDR-L2 and CDR-L3) and three make up the binding character of a heavy chain variable region (CDR-H1, CDR-H2 and CDR-H3). CDRs contain most of the residues responsible for specific interactions of the antibody (or antibody construct or binding domain) with the antigen and hence contribute to the functional activity of an antibody molecule: they are the main determinants of antigen specificity.

[0826] The exact definition of CDR boundaries and lengths is subject to different classification and numbering systems. CDRs may therefore be referred to by Kabat, Chothia, contact or any other boundary definitions, including the numbering system described herein. Despite differing boundaries, each of these systems has some degree of overlap in what constitutes the so called “hypervariable regions” within the variable sequences. CDR definitions according to these systems may therefore differ in length and boundary areas with respect to the adjacent framework region. See for example Kabat (an approach based on cross-species sequence variability), Chothia (an approach based on crystallographic studies of antigen-antibody complexes), and/or MacCallum (Kabat et al., loc. cit.; Chothia et al., J. MoI. Biol, 1987, 196: 901-917; and MacCallum et al., J. Mol. Biol, 1996, 262: 732). Still another standard for characterizing the antigen binding site is the AbM definition used by Oxford Molecular's AbM antibody modeling software. See, e.g., Protein Sequence and Structure Analysis of Antibody Variable Domains. In: Antibody Engineering Lab Manual (Ed.: Duebel, S. and Kontermann, R., Springer-Verlag, Heidelberg). To the extent that two residue identification techniques define regions of overlapping, but not identical regions, they can be combined to define a hybrid CDR. However, the numbering in accordance with the so-called Kabat system is preferred.

[0827] Typically, CDRs form a loop structure that can be classified as a canonical structure. The term “canonical structure” refers to the main chain conformation that is adopted by the antigen binding (CDR) loops. From comparative structural studies, it has been found that five of the six antigen binding loops have only a limited repertoire of available conformations. Each canonical structure can be characterized by the torsion angles of the polypeptide backbone. Corresponding loops between antibodies may, therefore, have very similar three-dimensional structures, despite high amino acid sequence variability in most parts of the loops (Chothia and Lesk, J. Mol. Biol., 1987, 196: 901; Chothia et al., Nature, 1989, 342: 877; Martin and Thornton, J. Mol. Biol, 1996, 263: 800). Furthermore, there is a relationship between the adopted loop structure and the amino acid sequences surrounding it. The conformation of a particular canonical class is determined by the length of the loop and the amino acid residues residing at key positions within the loop, as well as within the conserved framework (i.e., outside of the loop). Assignment to a particular canonical class can therefore be made based on the presence of these key amino acid residues.

[0828] The term “canonical structure” may also include considerations as to the linear sequence of the antibody, for example, as catalogued by Kabat (Kabat et al., loc. cit.). The Kabat numbering scheme (system) is a widely adopted standard for numbering the amino acid residues of an antibody variable region in a consistent manner and is the preferred scheme applied in the present invention as also mentioned elsewhere herein. Additional structural considerations can also be used to determine the canonical structure of an antibody. For example, those differences not fully reflected by Kabat numbering can be described by the numbering system of Chothia et al. and/or revealed by other techniques, for example, crystallography and two- or three-dimensional computational modeling. Accordingly, a given antibody sequence may be placed into a canonical class which allows for, among other things, identifying appropriate class sequences (e.g., based on a desire to include a variety of canonical structures in a library). Kabat numbering of antibody amino acid sequences and structural considerations as described by Chothia et al., loc. cit. and their implications for construing canonical aspects of antibody structure, are described in the literature. The subunit structures and three-dimensional configurations of different classes of immunoglobulins are well known in the art. For a review of the antibody structure, see Antibodies: A Laboratory Manual, Cold Spring Harbor Laboratory, eds. Harlow et al., 1988.

[0829] The CDR3 of the light chain and, particularly, the CDR3 of the heavy chain may constitute the most important determinants in antigen binding within the light and heavy chain variable regions. In some antibodies or antibody constructs/binding domains, the heavy chain CDR3 appears to constitute the major area of contact between the antigen and the antibody. In vitro selection schemes in which CDR3 alone is varied can be used to vary the binding properties of an antibody or antibody construct/binding domain or determine which residues contribute to the binding of an antigen. Hence, CDR3 is typically the greatest source of molecular diversity within the antibody binding site. CDR-H3, for example, can be as short as two amino acid residues or greater than 26 amino acids.

[0830] In a classical full-length antibody or immunoglobulin, each light (L) chain is linked to a heavy (H) chain by one covalent disulfide bond, while the two H chains are linked to each other by one or more disulfide bonds depending on the H chain isotype. The heavy chain constant (CH) domain most proximal to VH is usually designated as CH1. The constant (“C”) domains are not directly involved in antigen binding, but exhibit various effector functions, such as antibody-dependent cell-mediated cytotoxicity (ADCC) and complement activation (complement dependent cytotoxicity, CDC). The Fc region of an antibody is the “tail” region of a classical antibody that interacts with cell surface receptors called Fc receptors and some proteins of the complement system. In IgG, IgA and IgD antibody isotypes, the Fc region is composed of two identical protein fragments, derived from the second and third constant domains (CH2 and CH3) of the antibody's two heavy chains. IgM and IgE Fc regions contain three heavy chain constant domains (CH2, CH3 and CH4) in each polypeptide chain. The Fc regions also contains part of the so-called “hinge” region held together by one or more disulfides and noncovalent interactions. The Fc region of a naturally occurring IgG bears a highly conserved N-glycosylation site. Glycosylation of the Fc fragment is essential for Fc receptor-mediated activity.

[0831] ADCC is a mechanism of cell-mediated immune defense whereby an effector cell of the immune system actively lyses a target cell, whose membrane-surface antigens have been bound by specific antibodies. ADCC requires an immune effector cell which classically is known to be a natural killer (NK) cell that typically interacts with IgG antibodies. However, ADCC can also be mediated by macrophages, neutrophils and eosinophils. ADCC involves activation of effector cells expressing Fc receptors by antibodies expressing an Fc portion. For example, the most common Fc receptor on the surface of an NK cell is calles CD16 or FcγRIII. Once the Fc receptor binds to the Fc region of IgG, the NK cell releases cytotoxic factors that cause the death of the target cell. Likewise, the Fc receptor (FceRI) of an eosinophil will recognize IgE. In CDC, in contrast, the molecule “C1q” of the complement system binds to the antibody Fc region, and this binding triggers the complement cascade which leads to the formation of the membrane attack complex (MAC) at the surface of the target cell, because of the classical pathway complement activation. In therapeutic antibodies or antibody constructs, both ADCC and CDC can be modulated by Fc isotype engineering, Fc genetic mutations, or Fc glycosylation profile modifications.

[0832] The sequence of antibody genes after assembly and somatic mutation is highly varied, and these varied genes are estimated to encode 1010 different antibody molecules (Immunoglobulin Genes, 2nd ed., eds. Jonio et al., Academic Press, San Diego, Calif., 1995). Accordingly, the immune system provides a repertoire of immunoglobulins. The term “repertoire” refers to at least one nucleotide sequence derived wholly or partially from at least one sequence encoding at least one immunoglobulin. The sequence(s) may be generated by rearrangement in vivo of the V, D, and J segments of heavy chains, and the V and J segments of light chains. Alternatively, the sequence(s) can be generated from a cell in response to which rearrangement occurs, e.g., in vitro stimulation. Alternatively, part or all the sequence(s) may be obtained by DNA splicing, nucleotide synthesis, mutagenesis, and other methods, see, e.g., U.S. Pat. No. 5,565,332. A repertoire may include only one sequence or may include a plurality of sequences, including ones in a genetically diverse collection.

[0833] It is envisaged that the antibody construct has a cysteine clamp within the first domain. This cysteine clamp may be introduced to improve stability of the construct. See e.g. US 2016/0193295.

[0834] As described herein above, the invention provides an embodiment wherein the antibody construct is in a format selected from the group consisting of (scFv)2, scFv-single domain mAb, diabodies and oligomers of any of the aforementioned formats. The term “is in a format” does not exclude that the construct can be further modified, e.g. by attachment or fusion to other moieties, as described herein. According to one embodiment of the antibody construct used in accordance with the present invention, the first and/or the second domain are in the format of an scFv. In an scFv, the VH region and the and VL region are arranged in the order VH-VL or VL-VH (from N- to C-terminus). It is envisaged that the VH and the VL regions of the first and/or the second binding domain are connected via a linker, preferably a peptide linker. According to one embodiment of the first and/or the second domain, the VH-region is positioned N-terminally of the linker, and the VL-region is positioned C-terminally of the linker. In other words, in one embodiment of the first and/or the second domain, the scFv comprises from the N-terminus to the C-terminus: VH-linker-VL. It is furthermore envisaged that the first domain and the second domain of the antibody construct are connected via a linker, preferably a peptide linker. The antibody construct may e.g. comprise the domains in the order (from N-terminus to C-terminus) first domain—linker—second domain. The inverse order (second domain—linker—first domain) is also possible.

[0835] The linkers are preferably peptide linkers, more preferably short peptide linkers. In accordance with the present invention, a “peptide linker” comprises an amino acid sequence which connects the amino acid sequences of one domain with another (variable and/or binding) domain (e.g. a variable domain or a binding domain) of the antibody construct. An essential technical feature of such peptide linker is that it does not comprise any polymerization activity. Among the suitable peptide linkers are those described in U.S. Pat. Nos. 4,751,180 and 4,935,233 or WO 88/09344. The peptide linkers can also be used to attach other domains or modules or regions (such as half-life extending domains) to the antibody construct used in accordance with the invention. Examples of useful peptide linkers are shown in SEQ ID NOs: 202-215. In the present context, a “short” linker has between 2 and 50 amino acids, preferably between 3 and 35, between 4 and 30, between 5 and 25, between 6 and 20 or between 6 and 17 amino acids. The linker between two variable regions of one binding domain may have a different length (e.g. may be longer) than the linker between the two binding domains. For example, the linker between two variable regions of one binding domain may have a length between 7 and 15 amino acids, preferably between 9 and 13, and the linker between the two binding domains may have a length between 3 and 10 amino acids, preferably between 4 and 8. It is further envisaged that the peptide linkers are glycine/serine linkers, such as those depicted in SEQ ID NOs: 203 and 205-215. Most of the amino acids in glycine/serine linkers are selected from glycine and serine.

[0836] If a linker is used, this linker is preferably of a length and sequence that are enough to ensure that each of the first and second domains can, independently from one another, retain their differential binding specificities. For peptide linkers which connect the at least two binding domains (or the two variable regions forming one binding domain) in the antibody construct, those peptide linkers are envisaged which comprise only a few amino acid residues, e.g. 12 amino acid residues or less. Thus, peptide linkers of 12, 11, 10, 9, 8, 7, 6 or 5 amino acid residues are preferred. An envisaged peptide linker with less than 5 amino acids comprises 4, 3, 2 or one amino acid(s), wherein Gly-rich linkers are preferred. A “single amino acid” linker in the context of said “peptide linker” is Gly. Another embodiment of a peptide linker is characterized by the amino acid sequence Gly-Gly-Gly-Gly-Ser, i.e. Gly4Ser (SEQ ID NO: 203), or polymers thereof, i.e. (Gly4Ser)x, where x is an integer of 1 or greater (e.g. 2 or 3). Usable linkers are depicted in SEQ ID NOs: 202-211. The characteristics of said peptide linkers are known in the art and are described e.g. in Dall'Acqua et al. (Biochem. (1998) 37, 9266-9273), Cheadle et al. (Mol Immunol (1992) 29, 21-30) and Raag and Whitlow (FASEB (1995) 9(1), 73-80). Peptide linkers which do not promote any secondary structures are preferred. The linkage of said domains to each other can be provided, e.g., by genetic engineering. Methods for preparing fused and operatively linked bispecific single chain constructs and expressing them in mammalian cells or bacteria are well-known in the art (e.g. WO 99/54440 or Sambrook et al., Molecular Cloning: A Laboratory Manual, Cold Spring Harbor Laboratory Press, Cold Spring Harbor, N.Y., 2001).

[0837] According to one embodiment of the invention, the antibody construct in combination products, or that is used in combination in accordance with the invention is a “single chain antibody construct”. It is also envisaged that either the first or the second or both binding domains may be in the format of a “single chain Fv” (scFv). Although the two domains of the Fv fragment, VL and VH, are coded for by separate genes, they can be joined, using recombinant methods, by an artificial linker—as described hereinbefore—that enables them to be made as a single protein chain in which the VL and VH regions pair to form a monovalent molecule; see e.g., Huston et al. (1988) Proc. Natl. Acad. Sci USA 85:5879-5883). These antibody fragments are obtained using conventional techniques known to those with skill in the art, and the fragments are evaluated for function in the same manner as are full-length antibodies or IgGs. A single-chain variable fragment (scFv) is hence a fusion protein of the variable region of the heavy chain (VH) and of the light chain (VL) of immunoglobulins, usually connected with a short linker peptide. The linker is usually rich in glycine for flexibility, as well as serine or also threonine for solubility, and can either connect the N-terminus of the VH with the C-terminus of the VL, or vice versa. This protein retains the specificity of the original immunoglobulin, despite removal of the constant regions and introduction of the linker.

[0838] Bispecific single chain molecules are known in the art and are described in WO 99/54440, Mack, J. Immunol. (1997), 158, 3965-3970, Mack, PNAS, (1995), 92, 7021-7025, Kufer, Cancer Immunol. Immunother., (1997), 45, 193-197, Löffler, Blood, (2000), 95, 6, 2098-2103, Brühl, Immunol., (2001), 166, 2420-2426, Kipriyanov, J. Mol. Biol., (1999), 293, 41-56. Techniques described for producing single chain antibody constructs (see, inter alia, U.S. Pat. No. 4,946,778, Kontermann and Dübel (2010), loc. cit. and Little (2009), loc. cit.) can be adapted to produce single chain antibody constructs specifically recognizing (an) elected target(s).

[0839] Bivalent (also called divalent) or bispecific single-chain variable fragments (bi-scFvs or di-scFvs) having the format (scFv)2 can be engineered by linking two scFv molecules (e.g. with linkers as described hereinbefore). The linking can be done by producing a single polypeptide chain with two VH regions and two VL regions, yielding tandem scFvs (see e.g. Kufer P. et al., (2004) Trends in Biotechnology 22(5):238-244). Another possibility is the creation of scFv molecules with linker peptides that are too short for the two variable regions to fold together (e.g. about five amino acids), forcing the scFvs to dimerize. In this case, the VH and th VL of a binding domain (binding either to the target antigen or to CD3) are not directly connected via a peptide linker. Thus, the VH of the CD3 binding domain may e.g. be fused to the VL of the target antigen(s) binding domain via a peptide linker, and the VH of the target antigen(s) binding domain is fused to the VL of the CD3 binding domain via such peptide linker. This type is known as diabodies (see e.g. Hollinger, Philipp et al., (July 1993) Proceedings of the National Academy of Sciences of the United States of America 90 (14): 6444-8).

[0840] Antibody constructs denominated “single domain antibodies” comprise one (monomeric) antibody variable region which can bind selectively to a specific antigen, independently of other variable regions. The first single domain antibodies were engineered from heavy chain antibodies found in camelids, and these are called VHH fragments. Cartilaginous fishes also have heavy chain antibodies (IgNAR) from which single domain antibodies called VNAR fragments can be obtained. An alternative approach is to split the dimeric variable regions from common immunoglobulins into monomers, hence obtaining VH or VL as a single domain Ab. Although most research into single domain antibodies is currently based on heavy chain variable regions, nanobodies derived from light chains were also shown to bind specifically to target epitopes. Examples of single domain antibodies are called sdAb, nanobodies or single variable domain antibodies. A (single domain mAb)2 is hence a monoclonal antibody construct composed of (at least) two single domain monoclonal antibody constructs, which are individually selected from the group comprising VH, VL, VHH and VNAR. The linker is preferably in the form of a peptide linker. Similarly, an “scFv-single domain mAb” is a monoclonal antibody construct composed of at least one single domain antibody as described above and one scFv molecule as described above. Again, the linker is preferably in the form of a peptide linker.

[0841] It is also envisaged that the antibody construct has, in addition to its function to bind to the target molecules and CD3, a further function. In this format, the antibody construct may be a trifunctional or multifunctional antibody construct by targeting target cells through target antigen binding, mediating cytotoxic T cell activity through CD3 binding and providing a further function such as means or domains to enhance or extend serum half-life, a fully functional or modified Fc constant domain mediating ADCC through recruitment of effector cells, a label (fluorescent etc.), a therapeutic agent such as a toxin or radionuclide, etc.

[0842] Examples for means or domains to extend serum half-life of the antibody constructs include peptides, proteins or domains of proteins, which are fused or otherwise attached to the antibody constructs. The group of peptides, proteins or protein domains includes peptides binding to other proteins with preferred pharmacokinetic profile in the human body such as serum albumin (see WO 2009/127691). An alternative concept of such half-life extending peptides includes peptides binding to the neonatal Fc receptor (FcRn, see WO 2007/098420), which can also be used in the antibody constructs used in accordance with the present invention. The concept of attaching larger domains of proteins or complete proteins includes the fusion of human serum albumin, variants or mutants of human serum albumin (see WO 2011/051489, WO 2012/059486, WO 2012/150319, WO 2013/135896, WO 2014/072481, WO 2013/075066) or domains thereof, as well as the fusion of an immunoglobulin constant region (Fc domain) and variants thereof. Such variants of Fc domains are called Fc-based domains and may e.g. be optimized/modified to allow the desired pairing of dimers or multimers, to abolish Fc receptor binding (e.g. to avoid ADCC or CDC) or for other reasons. A further concept known in the art to extend the half-life of substances or molecules in the human body is the pegylation of those molecules (such as the antibody constructs used in accordance with the present invention).

[0843] In one embodiment, the antibody constructs used in accordance with the invention are linked (e.g. via peptide bond) with a fusion partner (such as a protein, polypeptide or peptide), e.g. for extending the construct's serum half-life. These fusion partners can be selected from human serum albumin (“HSA” or “HALB”) as wells as sequence variants thereof, peptides binding to HSA, peptides binding to FcRn (“FcRn BP”), or constructs comprising an (antibody derived) Fc region. Exemplary sequences of these fusion partners are depicted in SEQ ID NOs: 216-278. In general, the fusion partners may be linked to the N-terminus or to the C-terminus of the antibody constructs used in accordance with the invention, either directly (e.g. via peptide bond) or through a peptide linker such as (GGGGS)n (wherein “n” is an integer of 2 or greater, e.g. 2 or 3 or 4). Suitable peptide linkers are depicted in SEQ ID NOs: 202-211.

[0844] According to another embodiment, the antibody construct used in accordance with the invention comprises (in addition to the first and second domain) a third domain which comprises two polypeptide monomers, each comprising a hinge, a CH2 and a CH3 domain, wherein said two polypeptide monomers are fused to each other via a peptide linker. It is envisaged that said third domain comprises in N-terminal to C-terminal order: hinge-CH2-CH3-linker-hinge-CH2-CH3.

[0845] In line with the present invention, a “hinge” is an IgG hinge region. This region can be identified by analogy using the Kabat numbering, see e.g. Kabat positions 223-243. In line with the above, the minimal requirement for a “hinge” are the amino acid residues corresponding to the IgG1 sequence stretch of D231 to P243 according to the Kabat numbering. The terms “CH2” and “CH3” refer to the immunoglobulin heavy chain constant regions 2 and 3. These regions can as well be identified by analogy using the Kabat numbering, see e.g. Kabat positions 244-360 for CH2 and Kabat positions 361-478 for CH3. Is understood that there is some variation between the immunoglobulins in terms of their IgG1 Fc region, IgG2 Fc region, IgG3 Fc region, IgG4 Fc region, IgM Fc region, IgA Fc region, IgD Fc region and IgE Fc region (see, e.g., Padlan, Molecular Immunology, 31(3), 169-217 (1993)). The term Fc region refers to the last two heavy chain constant regions of IgA, IgD, and IgG, and the last three heavy chain constant regions of IgE and IgM. The Fc region can also include the flexible hinge N-terminal to these domains. For IgA and IgM, the Fc region may include the J chain. For IgG, the Fc region comprises immunoglobulin domains CH2 and CH3 and the hinge between the first two domains and CH2. Although the boundaries of the Fc region of an immunoglobulin may vary, an example for a human IgG heavy chain Fc portion comprising a functional hinge, CH2 and CH3 domain can be defined e.g. to comprise residues D231 (of the hinge domain) to P476 (of the C-terminus of the CH3 domain), or D231 to L476, respectively, for IgG4, wherein the numbering is according to Kabat.

[0846] Covalent modifications of the antibody constructs are also included within the scope of this invention, and are generally, but not always, done post-translationally. For example, several types of covalent modifications of the antibody construct are introduced into the molecule by reacting specific amino acid residues of the antibody construct with an organic derivatizing agent that can react with selected side chains or with the N- or C-terminal residues. Derivatization with bifunctional agents is useful for crosslinking the antibody constructs used in accordance with the present invention to a water-insoluble support matrix or surface used in a variety of methods. Glutaminyl and asparaginyl residues are frequently deamidated to the corresponding glutamyl and aspartyl residues, respectively. Alternatively, these residues are deamidated under mildly acidic conditions. Either form of these residues falls within the scope of this invention. Other modifications include hydroxylation of proline and lysine, phosphorylation of hydroxyl groups of seryl or threonyl residues, methylation of the α-amino groups of lysine, arginine, and histidine side chains (T. E. Creighton, Proteins: Structure and Molecular Properties, W. H. Freeman & Co., San Francisco, 1983, pp. 79-86), acetylation of the N-terminal amine, and amidation of any C-terminal carboxyl group.

[0847] Another type of covalent modification of the antibody constructs included within the scope of this invention comprises altering the glycosylation pattern of the protein. As is known in the art, glycosylation patterns can depend on both the sequence of the protein (e.g., the presence or absence of specific glycosylation amino acid residues, discussed below), or the host cell or organism in which the protein is produced. Specific expression systems are discussed below. Glycosylation of polypeptides is typically either N-linked or O-linked. N-linked refers to the attachment of the carbohydrate moiety to the side chain of an asparagine residue. The tri-peptide sequences asparagine-X-serine and asparagine-X-threonine, where X is any amino acid except proline, are the recognition sequences for enzymatic attachment of the carbohydrate moiety to the asparagine side chain Thus, the presence of either of these tri-peptide sequences in a polypeptide creates a potential glycosylation site. O-linked glycosylation refers to the attachment of one of the sugars N-acetylgalactosamine, galactose, or xylose, to a hydroxyamino acid, most commonly serine or threonine, although 5-hydroxyproline or 5-hydroxylysine may also be used.

[0848] Addition of glycosylation sites to the antibody construct is conveniently accomplished by altering the amino acid sequence such that it contains one or more of the above-described tri-peptide sequences (for N-linked glycosylation sites). The alteration may also be made by the addition of, or substitution by, one or more serine or threonine residues to the starting sequence (for O-linked glycosylation sites). For ease, the amino acid sequence of an antibody construct may be altered through changes at the DNA level, particularly by mutating the DNA encoding the polypeptide at preselected bases such that codons are generated that will translate into the desired amino acids.

[0849] Another means of increasing the number of carbohydrate moieties on the antibody construct is by chemical or enzymatic coupling of glycosides to the protein. These procedures are advantageous in that they do not require production of the protein in a host cell that has glycosylation capabilities for N- and O-linked glycosylation. Depending on the coupling mode used, the sugar(s) may be attached to (a) arginine and histidine, (b) free carboxyl groups, (c) free sulfhydryl groups such as those of cysteine, (d) free hydroxyl groups such as those of serine, threonine, or hydroxyproline, (e) aromatic residues such as those of phenylalanine, tyrosine, or tryptophan, or (f) the amide group of glutamine. These methods are described in WO 87/05330, and in Aplin and Wriston, 1981, CRC Crit. Rev. Biochem., pp. 259-306.

[0850] Removal of carbohydrate moieties present on the starting antibody construct may be accomplished chemically or enzymatically. Chemical deglycosylation requires exposure of the protein to the compound trifluoromethanesulfonic acid, or an equivalent compound. This treatment results in the cleavage of most or all sugars except the linking sugar (N-acetylglucosamine or N-acetylgalactosamine), while leaving the polypeptide intact. Chemical deglycosylation is described by Hakimuddin et al., 1987, Arch. Biochem. Biophys. 259:52 and by Edge et al., 1981, Anal. Biochem. 118:131. Enzymatic cleavage of carbohydrate moieties on polypeptides can be achieved using a variety of endo- and exo-glycosidases as described by Thotakura et al., 1987, Meth. Enzymol. 138:350. Glycosylation at potential glycosylation sites may be prevented using the compound tunicamycin as described by Duskin et al., 1982, J. Biol. Chem. 257:3105. Tunicamycin blocks the formation of protein-N-glycoside linkages.

[0851] Other modifications of the antibody construct are also contemplated herein. For example, another type of covalent modification of the antibody construct comprises linking the antibody construct to various non-proteinaceous polymers, including polyols, in the manner set forth in U.S. Pat. Nos. 4,640,835; 4,496,689; 4,301,144; 4,670,417; 4,791,192 or 4,179,337. In addition, as is known in the art, amino acid substitutions may be made in various positions within the antibody construct, e.g. to facilitate the addition of polymers such as polyethylene glycol (PEG).

[0852] In some embodiments, the covalent modification of the antibody constructs used in accordance with the invention comprises the addition of one or more labels. The labelling group may be coupled to the antibody construct via spacer arms of various lengths to reduce potential steric hindrance. Various methods for labelling proteins are known in the art and can be used in performing the present invention. The term “label” or “labelling group” refers to any detectable label. In general, labels fall into a variety of classes, depending on the assay in which they are to be detected—the following examples include, but are not limited to:
[0853] (a) isotopic labels, which may be radioactive or heavy isotopes, such as radioisotopes or radionuclides (e.g., 3H, 14C, 15N, 35S, 89Zr, 90Y, 99Tc, 111In, 125I, 131I)
[0854] (b) magnetic labels (e.g., magnetic particles)
[0855] (c) redox active moieties
[0856] (d) optical dyes (including, but not limited to, chromophores, phosphors and fluorophores) such as fluorescent groups (e.g., FITC, rhodamine, lanthanide phosphors), chemiluminescent groups, and fluorophores which can be either “small molecule” fluores or proteinaceous fluores
[0857] (e) enzymatic groups (e.g. horseradish peroxidase, β-galactosidase, luciferase, alkaline phosphatase)
[0858] (f) biotinylated groups
[0859] (g) predetermined polypeptide epitopes recognized by a secondary reporter (e.g., leucine zipper pair sequences, binding sites for secondary antibodies, metal binding domains, epitope tags, etc.).

[0860] By “fluorescent label” is meant any molecule that may be detected via its inherent fluorescent properties. Suitable fluorescent labels include, but are not limited to, fluorescein, rhodamine, tetramethylrhodamine, eosin, erythrosin, coumarin, methyl-coumarins, pyrene, Malacite green, stilbene, Lucifer Yellow, Cascade BlueJ, Texas Red, IAEDANS, EDANS, BODIPY FL, LC Red 640, Cy 5, Cy 5.5, LC Red 705, Oregon green, the Alexa-Fluor dyes (Alexa Fluor 350, Alexa Fluor 430, Alexa Fluor 488, Alexa Fluor 546, Alexa Fluor 568, Alexa Fluor 594, Alexa Fluor 633, Alexa Fluor 660, Alexa Fluor 680), Cascade Blue, Cascade Yellow and R-phycoerythrin (PE) (Molecular Probes, Eugene, Oreg.), FITC, Rhodamine, and Texas Red (Pierce, Rockford, Ill.), Cy5, Cy5.5, Cy7 (Amersham Life Science, Pittsburgh, Pa.). Suitable optical dyes, including fluorophores, are described in Molecular Probes Handbook by Richard P. Haugland.

[0861] Suitable proteinaceous fluorescent labels also include, but are not limited to, green fluorescent protein, including a Renilla, Ptilosarcus, or Aequorea species of GFP (Chalfie et al., 1994, Science 263:802-805), EGFP (Clontech Laboratories, Inc., Genbank® Accession Number U55762), blue fluorescent protein (BFP, Quantum Biotechnologies, Inc. 1801 de Maisonneuve Blvd. West, 8th Floor, Montreal, Quebec, Canada H3H 1J9; Stauber, 1998, Biotechniques 24:462-471; Heim et al., 1996, Curr. Biol. 6:178-182), enhanced yellow fluorescent protein (EYFP, Clontech Laboratories, Inc.), luciferase (Ichiki et al., 1993, J. Immunol. 150:5408-5417), β galactosidase (Nolan et al., 1988, Proc. Natl. Acad. Sci. U.S.A. 85:2603-2607) and Renilla (WO92/15673, WO95/07463, WO98/14605, WO98/26277, WO99/49019, U.S. Pat. Nos. 5,292,658; 5,418,155; 5,683,888; 5,741,668; 5,777,079; 5,804,387; 5,874,304; 5,876,995; 5,925,558).

[0862] Leucine zipper domains are peptides that promote oligomerization of the proteins in which they are found. Leucine zippers were originally identified in several DNA-binding proteins (Landschulz et al., 1988, Science 240:1759), and have since been found in a variety of different proteins. Among the known leucine zippers are naturally occurring peptides and derivatives thereof that dimerize or trimerize. Examples of leucine zipper domains suitable for producing soluble oligomeric proteins are described in PCT application WO94/10308, and the leucine zipper derived from lung surfactant protein D (SPD) described in Hoppe et al., 1994, FEBS Letters 344:191. The use of a modified leucine zipper that allows for stable trimerization of a heterologous protein fused thereto is described in Fanslow et al., 1994, Semin. Immunol. 6:267-78.

[0863] The antibody construct used in accordance with the invention may also comprise additional domains, which are e.g. helpful in the isolation of the molecule or relate to an adapted pharmacokinetic profile of the molecule. Domains helpful for the isolation of an antibody construct may be selected from peptide motives or secondarily introduced moieties, which can be captured in an isolation method, e.g. an isolation column. Non-limiting embodiments of such additional domains comprise peptide motives known as Myc-tag, HAT-tag, HA-tag, TAP-tag, GST-tag, chitin binding domain (CBD-tag), maltose binding protein (MBP-tag), Flag-tag, Strep-tag and variants thereof (e.g. StrepII-tag) and His-tag. All herein disclosed antibody constructs characterized by the identified CDRs may comprise a His-tag domain, which is generally known as a repeat of consecutive His residues in the amino acid sequence of a molecule, e.g. of five His residues (SEQ ID NO: 279), or of six His residues (hexa-histidine, SEQ ID NO: 280). The His-tag may be located e.g. at the N- or C-terminus of the antibody construct. In one embodiment, a hexa-histidine tag (HHHHHH) is linked via peptide bond to the C-terminus of the antibody construct used in accordance with the invention.

[0864] It is also envisaged that the antibody construct used in accordance with the present invention comprises or consists of a polypeptide which has an amino acid sequence selected from the group consisting of those depicted in SEQ ID NOs: 281 and 282, and which is linked at its N-terminus or at its C-terminus with a protein purification tag, preferably via a peptide bond (amide bond). The linking of the protein purification tag at the C-terminus of the polypeptide is preferred. It is envisaged that the protein purification tag is a short peptide. For example, the length of the short peptide may be 2-30 amino acids, 4-25 amino acids, 5-20 amino acids or 6-19 amino acids. Examples of protein purification tags include, but are not limited to, AU1 epitope (e.g. as depicted in SEQ ID NO: 285), AU5 epitope (e.g. as depicted in SEQ ID NO: 286), T7-tag (e.g. as depicted in SEQ ID NO: 287), V5-tag (e.g. as depicted in SEQ ID NO: 288), B-tag (e.g. as depicted in SEQ ID NO: 289), E2 epitope (e.g. as depicted in SEQ ID NO: 290), FLAG epitope/FLAG tag (e.g. as depicted in SEQ ID NO: 291), Glu-Glu tag (e.g. as depicted in SEQ ID NOs: 292 or 293), HA tag, Histidine affinity tag (e.g. as depicted in SEQ ID NO: 294), HSV epitope (e.g. as depicted in SEQ ID NO: 295), KT3 epitope (e.g. as depicted in SEQ ID NO: 296), Myc epitope (e.g. as depicted in SEQ ID NO: 297), polyarginine tag (5-6 Arg residues), polyaspartate tag (5-16 Asp residues), polyhistidine tag (2-10 His residues, usually 6 His residues, see e.g. SEQ ID NOs: 280, and (279, 298, 299-), polyphenylalanine tag (usually 11 Phe residues), S1 tag (e.g. as depicted in SEQ ID NO: 300), S-tag (e.g. as depicted in SEQ ID NO: 301), Strep tag (e.g. as depicted in SEQ ID NOs: 302 or 303), universal tag (e.g. as depicted in SEQ ID NO: 304), VSV-G (e.g. as depicted in SEQ ID NO: 305), Protein C (e.g. as depicted in SEQ ID NO: 306), and Protein A. A histidine tag is preferred, especially a 6×His tag (SEQ ID NO: 280). Is it hence further envisaged that the antibody construct used in accordance with the present invention consists of a polypeptide which has an amino acid sequence selected from the group consisting of those depicted in SEQ ID NOs: 281 and 282, and which is linked at its C-terminus with a 6×His tag via a peptide bond. An embodiment of the antibody construct used in accordance with the present invention has an amino acid sequence as depicted in SEQ ID NO: 283 or SEQ ID NO: 284.

[0865] T cells or T lymphocytes are a type of lymphocyte (itself a type of white blood cell) that play a central role in cell-mediated immunity. There are several subsets of T cells, each with a distinct function. T cells can be distinguished from other lymphocytes, such as B cells and NK cells, by the presence of a T cell receptor (TCR) on the cell surface. The TCR is responsible for recognizing antigens bound to major histocompatibility complex (MHC) molecules and is composed of two different protein chains. In 95% of the T cells, the TCR consists of an alpha (α) and beta (β) chain. When the TCR engages with antigenic peptide and MHC (peptide/MHC complex), the T lymphocyte is activated through a series of biochemical events mediated by associated enzymes, co-receptors, specialized adaptor molecules, and activated or released transcription factors.

[0866] The antibody construct used in accordance with the invention comprises a domain which binds to CD3 on the surface of a T cell. “CD3” (cluster of differentiation 3) is a T cell co-receptor composed of four chains. In mammals, the CD3 protein complex contains a CD3γ (gamma) chain, a CD3δ (delta) chain, and two CD3ε (epsilon) chains. These four chains associate with the T cell receptor (TCR) and the so-called (zeta) chain to for the “T cell receptor complex” and to generate an activation signal in T lymphocytes. The CD3γ (gamma), CD3δ (delta), and CD3ε (epsilon) chains are highly related cell-surface proteins of the immunoglobulin superfamily and each contain a single extracellular immunoglobulin domain. The intracellular tails of the CD3 molecules contain a single conserved motif known as an immunoreceptor tyrosine-based activation motif (ITAM), which is essential for the signaling capacity of the TCR. The CD3 epsilon molecule is a polypeptide which in humans is encoded by the CD3E gene which resides on chromosome 11.

[0867] The redirected lysis of target cells via the recruitment of T cells by an antibody construct which binds to CD3 on the T cell and to a target protein on the target cell generally involves cytolytic synapse formation and delivery of perforin and granzymes. The engaged T cells are capable of serial target cell lysis and are not affected by immune escape mechanisms interfering with peptide antigen processing and presentation, or clonal T cell differentiation; see e.g. WO2007/042261.

[0868] Cytotoxicity mediated by the herein described antibody constructs can be measured in various ways. The “half maximal effective concentration” (EC50) is commonly used as a measure of potency of a biologically active molecule such as an antibody construct used in accordance with the present invention. It may be expressed in molar units. In the present case of measuring cytotoxicity, the EC50 value refers to the concentration of an antibody construct inducing a cytotoxic response (lysis of target cells) halfway between the baseline and the maximum. Effector cells in a cytotoxicity assay can e.g. be stimulated enriched (human) CD8 positive T cells or unstimulated (human) peripheral blood mononuclear cells (PBMC). An EC50 value may typically be expected to be lower when stimulated/enriched CD8+ T cells are used as effector cells, compared with unstimulated PBMC. If the target cells are of macaque origin or express or are transfected with macaque target antigen, the effector cells should also be of macaque origin, such as a macaque T cell line, e.g. 4119LnPx. The target cells should express the target antigen(s), such as human or macaque the target antigen(s), on the cell surface. Target cells can be a cell line (such as CHO) which is stably or transiently transfected with nucleic acids encoding the target antigen(s). Alternatively, the target cells can be a target antigen(s)-positive natural expresser cell line, such as the human cancer lines. Usually EC50 values are expected to be lower when using target cells that express higher levels of the target antigen(s) on the cell surface compared with target cells having a lower target expression rate.

[0869] The effector to target cell (E:T) ratio in a cytotoxicity assay is usually about 10:1, but can also vary. Cytotoxic activity of the target antigen(s)×CD3 antibody constructs can be measured in a 51-chromium release assay (e.g. with an incubation time of about 18 hours) or in a in a FACS-based cytotoxicity assay (e.g. with an incubation time of about 48 hours). Modifications of the incubation time (cytotoxic reaction) are also envisaged. Other methods of measuring cytotoxicity are well-known and comprise MTT or MTS assays, ATP-based assays including bioluminescent assays, the sulforhodamine B (SRB) assay, WST assay, clonogenic assay and the ECIS technology.

[0870] According to one embodiment, the cytotoxic activity mediated by the target antigen(s)×CD3 antibody constructs used in accordance with the present invention is measured in a cell-based cytotoxicity assay. It may also be measured in a 51-chromium release assay. It is envisaged that the EC50 value of the antibody constructs used in accordance with the invention is ≤300 μM, ≤280 μM, ≤260 μM, ≤250 μM, ≤240 μM, ≤220 μM, ≤200 μM, ≤180 μM, ≤160 μM, ≤150 μM, ≤140 μM, ≤120 μM, ≤100 μM, ≤90 μM, ≤80 μM, ≤70 μM, ≤60 μM, ≤50 μM, ≤40 μM, ≤30 μM, ≤20 μM, ≤15 μM, ≤10 μM, or ≤5 μM.

[0871] The above given EC50 values can be measured in different assays and under different conditions. For example, when human PBMCs are used as effector cells and the target antigen(s)-transfected cells such as CHO cells are used as target cells, it is envisaged that the EC50 value of the antibody construct is ≤500 μM, ≤400 μM, ≤300 μM, ≤280 μM, ≤260 μM, ≤250 μM, ≤240 μM, ≤220 μM, ≤200 μM, ≤180 μM, ≤160 μM, ≤150 μM, 2140 μM, ≤120 μM, 2100 μM, ≤90 μM, ≤80 μM, ≤70 μM, ≤60 μM, ≤50 μM, ≤40 μM, ≤30 μM, ≤20 μM, ≤15 μM, ≤10 μM, or ≤5 μM. When human PBMCs are used as effector cells and when the target cells are a the target antigen(s) positive cell line such as, it is envisaged that the EC50 value of the target antigen(s)×CD3 antibody construct is ≤300 μM, ≤280 μM, ≤260 μM, ≤250 μM, ≤240 μM, ≤220 μM, ≤200 μM, ≤180 μM, ≤160 μM, ≤150 μM, ≤140 μM, ≤120 μM, ≤100 μM, ≤90 μM, ≤80 μM, ≤70 μM, ≤60 μM, ≤50 μM, ≤40 μM, ≤30 μM, ≤20 μM, ≤15 μM, ≤10 μM, or ≤5 μM.

[0872] According to one embodiment, the target antigen(s)×CD3 antibody constructs used in accordance with the present invention do not induce/mediate lysis or do not essentially induce/mediate lysis of cells that do not express the target antigen(s) on their surface (the target antigen(s)-negative cells), such as CHO cells. The term “do not induce lysis”, “do not essentially induce lysis”, “do not mediate lysis” or “do not essentially mediate lysis” means that an antibody construct used in accordance with the present invention does not induce or mediate lysis of more than 30%, preferably not more than 20%, more preferably not more than 10%, particularly preferably not more than 9%, 8%, 7%, 6% or 5% of the target antigen(s)-negative cells, whereby lysis of the target antigen(s) expressing target cells (such as cells transformed or transfected with the target antigen(s) or a natural expresser cell line such as human cancer lines) is set to be 100%. This usually applies for concentrations of the antibody construct of up to 500 nM. Cell lysis measurement is a routine technique. Moreover, the present specification teaches specific instructions how to measure cell lysis.

[0873] The difference in cytotoxic activity between the monomeric and the dimeric isoform of individual the target antigen(s)×CD3 antibody constructs is referred to as “potency gap”. This potency gap can e.g. be calculated as ratio between EC50 values of the molecule's monomeric and dimeric form. In one method to determine this gap, an 18 hour 51-chromium release assay or a 48 h FACS-based cytotoxicity assay is carried out as described known in the art with purified antibody construct monomer and dimer. Effector cells are stimulated enriched human CD8+ T cells or unstimulated human PBMC. Target cells are target antigen(s)-transfected CHO cells. Effector to target cell (E:T) ratio is 10:1. Potency gaps of the target antigen(s)×CD3 antibody constructs used in accordance with the present invention are preferably ≤5, more preferably ≤4, even more preferably ≤3, even more preferably ≤2 and most preferably ≤1.

[0874] The first and/or the second domain of the antibody construct used in accordance with the invention is/are preferably cross-species specific for members of the mammalian order of primates, such as macaques. Cross-species specific CD3 binding domains are, for example, described in WO 2008/119567. According to one embodiment, the second domain, in addition to binding to CD3, preferably human CD3, will also bind to CD3 of primates including (but not limited to) new world primates (such as Callithrix jacchus, Saguinus Oedipus or Saimiri sciureus), old world primates (such as baboons and macaques), gibbons, orangutans and non-human homininae. It is envisaged that the second domain which binds to CD3, preferably human CD3, on the surface of a T cell also binds at least to macaque CD3. A preferred macaque is Macaca fascicularis. Macaca mulatta (Rhesus) is also envisaged. One antibody construct used in accordance with the invention comprises a first domain which binds to human the target antigen(s) on the surface of a target cell and a second domain which binds to CD3, preferably human CD3, on the surface of a T cell and at least macaque CD3.

[0875] In one embodiment, the affinity gap of the antibody constructs used in accordance with the invention for binding macaque CD3 versus CD3, preferably human CD3, [KD ma CD3: KD hu CD3] (as determined e.g. by BiaCore or by Scatchard analysis) is between 0.01 and 100, preferably between 0.1 and 10, more preferably between 0.2 and 5, more preferably between 0.3 and 4, even more preferably between 0.5 and 3 or between 0.5 and 2.5, and most preferably between 0.5 and 1.

[0876] The second domain of the antibody construct used in accordance with the invention binds to CD3. More preferably, it binds to CD3 on the surface of a T cell. It is furthermore envisaged that the second domain binds to CD3, preferably human CD3, preferably to CD3, preferably human CD3, on the surface of a T cell. It is also envisaged that the second domain binds to CD3 epsilon. More preferably, it binds to CD3, preferably human CD3, epsilon, e.g. to CD3, preferably human CD3, epsilon on the surface of a T cell. A preferred amino acid sequence for the extracellular domain of CD3, preferably human CD3, epsilon is depicted in SEQ ID NO: 1.

[0877] In one embodiment used in accordance with the present invention, the second domain of the antibody construct binds to CD3, preferably human CD3, epsilon (or CD3, preferably human CD3, epsilon on the surface of a T cell) and to Callithrix jacchus or Saimiri sciureus CD3 epsilon. It is also envisaged that the second domain binds to an extracellular epitope of CD3 epsilon, preferably to an extracellular epitope of CD3, preferably human CD3, epsilon. It is also envisaged that the second domain binds to an extracellular epitope of the human and the Macaca CD3 epsilon chain. One preferred epitope of CD3 epsilon is comprised within amino acid residues 1-27 of the CD3, preferably human CD3, epsilon extracellular domain (see SEQ ID NO: 2). Even more specifically, the epitope comprises at least the amino acid sequence Gln-Asp-Gly-Asn-Glu. Callithrix jacchus is a new world primate belonging to the family of Callitrichidae, while Saimiri sciureus is a new world primate belonging to the family of Cebidae. Binders having such characteristics are described in detail in WO 2008/119567.

[0878] Antibodies or bispecific antibody constructs directed against (human) CD3 or specifically against CD3 epsilon are known in the art, and their CDRs, VH and VL sequences can serve as a basis for the second binding domain of the antibody construct used in accordance with the invention. For example, Kung et al. reported in 1979 the development of OKT3 (Ortho Kung T3), the first mAb recognizing CD3 (specifically, the epsilon chain of CD3) on human T cells. OKT3 (muromonab) was the first monoclonal antibody of murine origin to become available for therapy in humans. Newer anti-CD3 monoclonal antibodies include otelixizumab (TRX4), teplizumab (MGA031), foralumab and visilizumab, all targeting the epsilon chain of CD3. Bispecific antibody constructs directed against a (cancer) target and CD3 are also being developed and (pre-)clinically tested, and their CD3 binding domain (CDRs, VH, VL) may serve as a basis for the second binding domain of the antibody construct used in accordance with the invention. Examples include, but are not limited to, Blinatumomab, Solitomab (MT110, AMG 110), Catumaxomab, Duvortuxizumab, Ertumaxomab, Mosunetuzumab, FBTA05 (Bi20, TPBs05), CEA-TCB (RG7802, R06958688), AFM11, and MGD006 (S80880). Other examples of CD3 binding domains are disclosed e.g. in U.S. Pat. No. 7,994,289 B2, U.S. Pat. No. 7,728,114 B2, U.S. Pat. No. 7,381,803 B1, U.S. Pat. No. 6,706,265 B1.

[0879] It is envisaged for the antibody construct used in accordance with the present invention that the second domain which binds to CD3 on the surface of a T cell comprises a VL region comprising CDR-L1, CDR-L2 and CDR-L3 selected from: CDR-L1 as depicted in SEQ ID NO: 3, CDR-L2 as depicted in SEQ ID NO: 4, and CDR-L3 as depicted in SEQ ID NO: 5; CDR-L1 as depicted in SEQ ID NO: 6, CDR-L2 as depicted in SEQ ID NO: 7, and CDR-L3 as depicted in SEQ ID NO: 8; and CDR-L1 as depicted in SEQ ID NO: 9, CDR-L2 as depicted in SEQ ID NO: 10, and CDR-L3 as depicted in SEQ ID NO: 11.

[0880] It is also envisaged for the antibody construct used in accordance with the present invention that the second domain which binds to CD3 on the surface of a T cell comprises a VH region comprising CDR-H1, CDR-H2 and CDR-H3 selected from: CDR-H1 as depicted in SEQ ID NO: 12, CDR-H2 as depicted in SEQ ID NO: 13, and CDR-H3 as depicted in SEQ ID NO: 14; CDR-H1 as depicted in SEQ ID NO: 15, CDR-H2 as depicted in SEQ ID NO: 16, and CDR-H3 as depicted in SEQ ID NO: 17; CDR-H1 as depicted in SEQ ID NO: 18, CDR-H2 as depicted in SEQ ID NO: 19, and CDR-H3 as depicted in SEQ ID NO: 20; CDR-H1 as depicted in SEQ ID NO: 21, CDR-H2 as depicted in SEQ ID NO: 22, and CDR-H3 as depicted in SEQ ID NO: 23; CDR-H1 as depicted in SEQ ID NO: 24, CDR-H2 as depicted in SEQ ID NO: 25, and CDR-H3 as depicted in SEQ ID NO: 26; CDR-H1 as depicted in SEQ ID NO: 27, CDR-H2 as depicted in SEQ ID NO: 28, and CDR-H3 as depicted in SEQ ID NO: 29; CDR-H1 as depicted in SEQ ID NO: 30, CDR-H2 as depicted in SEQ ID NO: 31, and CDR-H3 as depicted in SEQ ID NO: 32; CDR-H1 as depicted in SEQ ID NO: 33, CDR-H2 as depicted in SEQ ID NO: 34, and CDR-H3 as depicted in SEQ ID NO: 35; CDR-H1 as depicted in SEQ ID NO: 36, CDR-H2 as depicted in SEQ ID NO: 37, and CDR-H3 as depicted in SEQ ID NO: 38; and CDR-H1 as depicted in SEQ ID NO: 39, CDR-H2 as depicted in SEQ ID NO: 40, and CDR-H3 as depicted in SEQ ID NO: 41.

[0881] It is furthermore envisaged for the antibody construct used in accordance with the present invention that the second domain which binds to CD3 comprises a VL region comprising CDR-L1, CDR-L2 and CDR-L3 and a VH region comprising CDR-H1, CDR-H2 and CDR-H3 selected from: CDR-L1 as depicted in SEQ ID NO: 42, CDR-L2 as depicted in SEQ ID NO: 43, CDR-L3 as depicted in SEQ ID NO: 44, CDR-H1 as depicted in SEQ ID NO: 12, CDR-H2 as depicted in SEQ ID NO: 13, and CDR-H3 as depicted in SEQ ID NO: 14; CDR-L1 as depicted in SEQ ID NO: 3, CDR-L2 as depicted in SEQ ID NO: 4, CDR-L3 as depicted in SEQ ID NO: 5, CDR-H1 as depicted in SEQ ID NO: 15, CDR-H2 as depicted in SEQ ID NO: 16, and CDR-H3 as depicted in SEQ ID NO: 17; CDR-L1 as depicted in SEQ ID NO: 45, CDR-L2 as depicted in SEQ ID NO: 46, CDR-L3 as depicted in SEQ ID NO: 47, CDR-H1 as depicted in SEQ ID NO: 48, CDR-H2 as depicted in SEQ ID NO: 49, and CDR-H3 as depicted in SEQ ID NO: 50; CDR-L1 as depicted in SEQ ID NO: 51, CDR-L2 as depicted in SEQ ID NO: 52, CDR-L3 as depicted in SEQ ID NO: 53, CDR-H1 as depicted in SEQ ID NO: 21, CDR-H2 as depicted in SEQ ID NO: 22, and CDR-H3 as depicted in SEQ ID NO: 23; CDR-L1 as depicted in SEQ ID NO: 54, CDR-L2 as depicted in SEQ ID NO: 55, CDR-L3 as depicted in SEQ ID NO: 56, CDR-H1 as depicted in SEQ ID NO: 24, CDR-H2 as depicted in SEQ ID NO: 25, and CDR-H3 as depicted in SEQ ID NO: 26; CDR-L1 as depicted in SEQ ID NO: 57, CDR-L2 as depicted in SEQ ID NO: 58, CDR-L3 as depicted in SEQ ID NO: 59, CDR-H1 as depicted in SEQ ID NO: 27, CDR-H2 as depicted in SEQ ID NO: 28, and CDR-H3 as depicted in SEQ ID NO: 29; CDR-L1 as depicted in SEQ ID NO: 6, CDR-L2 as depicted in SEQ ID NO: 7, CDR-L3 as depicted in SEQ ID NO: 8, CDR-H1 as depicted in SEQ ID NO: 30, CDR-H2 as depicted in SEQ ID NO: 31, and CDR-H3 as depicted in SEQ ID NO: 32; CDR-L1 as depicted in SEQ ID NO: 60, CDR-L2 as depicted in SEQ ID NO: 61, CDR-L3 as depicted in SEQ ID NO: 62, CDR-H1 as depicted in SEQ ID NO: 33, CDR-H2 as depicted in SEQ ID NO: 34, and CDR-H3 as depicted in SEQ ID NO: 35; CDR-L1 as depicted in SEQ ID NO: 9, CDR-L2 as depicted in SEQ ID NO: 10, CDR-L3 as depicted in SEQ ID NO: 11, CDR-H1 as depicted in SEQ ID NO: 36, CDR-H2 as depicted in SEQ ID NO: 37, and CDR-H3 as depicted in SEQ ID NO: 38; and CDR-L1 as depicted in SEQ ID NO: 63, CDR-L2 as depicted in SEQ ID NO: 64, CDR-L3 as depicted in SEQ ID NO: 65, CDR-H1 as depicted in SEQ ID NO: 39, CDR-H2 as depicted in SEQ ID NO: 40, and CDR-H3 as depicted in SEQ ID NO: 41.

[0882] It is envisaged for the antibody construct used in accordance with the present invention that the second domain which binds to CD3 on the surface of a T cell comprises a VL region selected from the group consisting of a VL region as depicted in any one of SEQ ID NO: 66, SEQ ID NO: 67, SEQ ID NO: 68, SEQ ID NO: 69, SEQ ID NO: 70 and SEQ ID NO: 71.

[0883] It is also envisaged that the second domain which binds to CD3 on the surface of a T cell comprises a VH region selected from the group consisting of a VH region as depicted in any one of SEQ ID NO: 72, SEQ ID NO: 73, SEQ ID NO: 74, SEQ ID NO: 75, SEQ ID NO: 76, SEQ ID NO: 77, SEQ ID NO: 78, SEQ ID NO: 79, SEQ ID NO: 80, SEQ ID NO: 81, SEQ ID NO: 82, SEQ ID NO: 83, SEQ ID NO: 84, SEQ ID NO: 85, SEQ ID NO: 86, SEQ ID NO: 87, SEQ ID NO: 88, SEQ ID NO: 89, SEQ ID NO: 90,

[0884] SEQ ID NO: 91, and SEQ ID NO: 92.

[0885] More preferably, the antibody construct used in accordance with the present invention is characterized by the second domain which binds to CD3 on the surface of a T cell comprising a VL region and a VH region selected from the group consisting of:
[0886] (a) a VL region as depicted in SEQ ID NO: 93 or 69 and a VH region as depicted in SEQ ID NO: 72 or 83;
[0887] (b) a VL region as depicted in SEQ ID NO: 66 or 69 and a VH region as depicted in SEQ ID NO: 73 or 84;
[0888] (c) a VL region as depicted in SEQ ID NO: 94 or 69 and a VH region as depicted in SEQ ID NO: 74 or 85;
[0889] (d) a VL region as depicted in SEQ ID NO: 95 or 69 and a VH region as depicted in SEQ ID NO: 75 or 86;
[0890] (e) a VL region as depicted in SEQ ID NO: 96 or 70 and a VH region as depicted in SEQ ID NO: 76 or 87;
[0891] (f) a VL region as depicted in SEQ ID NO: 97 or 69 and a VH region as depicted in SEQ ID NO: 77 or 88;
[0892] (g) a VL region as depicted in SEQ ID NO: 67 or 70 and a VH region as depicted in SEQ ID NO: 78 or 89;
[0893] (h) a VL region as depicted in SEQ ID NO: 98 or 69 and a VH region as depicted in SEQ ID NO: 79 or 90;
[0894] (i) a VL region as depicted in SEQ ID NO: 68 or 71 and a VH region as depicted in SEQ ID NO: 80 or 91;
[0895] (j) a VL region as depicted in SEQ ID NO: 99 or 71 and a VH region as depicted in SEQ ID NO: 81 or 92; and
[0896] (k) a VL region as depicted in SEQ ID NO: 100 and a VH region as depicted in SEQ ID NO: 82.

[0897] A preferred embodiment of the above described antibody construct used in accordance with the present invention is characterized by the second domain which binds to CD3 on the surface of a T cell comprising an amino acid sequence selected from the group consisting of SEQ ID NOs: 101, 102, 103, 104, 105, 106, 107, 108, 109, 110, 111, 112, 113, 114, 115, 116, 117, 118, 119, 120 and 121.

[0898] Amino acid sequence modifications of the antibody constructs described herein are also contemplated. For example, it may be desirable to improve the binding affinity and/or other biological properties of the antibody construct. Amino acid sequence variants of the antibody constructs are prepared by peptide synthesis or by introducing appropriate nucleotide changes into the nucleic acid molecule encoding the antibody constructs. All below described amino acid sequence modifications should result in an antibody construct which retains the desired biological activity of the unmodified parental molecule (such as binding to the target antigen(s) and to CD3, inducing cytotoxicity against the target antigen(s)-positive target cells).

[0899] The term “amino acid” or “amino acid residue” typically refers to an amino acid having its art recognized definition such as an amino acid selected from the group consisting of: alanine (Ala or A); arginine (Arg or R); asparagine (Asn or N); aspartic acid (Asp or D); cysteine (Cys or C); glutamine (GIn or Q); glutamic acid (GIu or E); glycine (GIy or G); histidine (His or H); isoleucine (Ile or I): leucine (Leu or L); lysine (Lys or K); methionine (Met or M); phenylalanine (Phe or F); proline (Pro or P); serine (Ser or S); threonine (Thr or T); tryptophan (Trp or W); tyrosine (Tyr or Y); and valine (VaI or V), although modified, synthetic, or rare amino acids may be used as desired. There are basically four different classes of amino acids determined by different side chains:
[0900] (i) non-polar and neutral (uncharged): Ala, Gly, Ile, Leu, Met, Phe, Pro, Val,
[0901] (ii) polar and neutral (uncharged): Asn, Cys (being only slightly polar), Gln, Ser, Thr, Trp (being only slightly polar), Tyr,
[0902] (iii) acidic and polar (negatively charged): Asp and Glu,
[0903] (iv) basic and polar (positively charged): Arg, His, Lys.

[0904] Hydrophobic amino acids can be divided according to whether they have aliphatic or aromatic side chains. Phe and Trp (being very hydrophobic), Tyr and His (being less hydrophobic) are classified as aromatic amino acids. Strictly speaking, aliphatic means that the side chain contains only hydrogen and carbon atoms. By this strict definition, the amino acids with aliphatic side chains are alanine, isoleucine, leucine (also norleucine), proline and valine. Alanine's side chain, being very short, means that it is not particularly hydrophobic, and proline has an unusual geometry that gives it special roles in proteins. It is often convenient to consider methionine in the same category as isoleucine, leucine and valine, although it also contains a sulphur atom. The unifying theme is that these amino acids contain largely non-reactive and flexible side chains. The amino acids alanine, cysteine, glycine, proline, serine and threonine are often grouped together because they are all small. Gly and Pro may influence chain orientation.

[0905] Amino acid modifications include, for example, deletions of residues from, insertions of residues into, and/or substitutions of residues within the amino acid sequences of the antibody constructs. Any combination of deletion, insertion, and/or substitution is made to arrive at a final antibody construct, provided that the final construct possesses the desired characteristics, e.g. the biological activity of the unmodified parental molecule (such as binding to the target antigen(s) and to CD3, inducing cytotoxicity against the target antigen(s) positive target cells). The amino acid changes may also alter post-translational processes of the antibody constructs, such as changing the number or position of glycosylation sites.

[0906] For example, 1, 2, 3, 4, 5, or 6 amino acids may be inserted, deleted and/or substituted in each of the CDRs (of course, dependent on their respective length), while 1, 2, 3, 4, 5, 6, 7, 8, 9, 10, 11, 12, 13, 14, 15, 16, 17, 18, 19, 20, or 25 amino acids may be inserted, deleted and/or substituted in each of the FRs. Amino acid sequence insertions also include N-terminal and/or C-terminal additions of amino acids ranging in length from e.g. 1, 2, 3, 4, 5, 6, 7, 8, 9 or 10 residues to polypeptides containing more than 10, e.g. one hundred or more residues, as well as intra-sequence insertions of single or multiple amino acid residues. An insertional variant of the antibody construct used in accordance with the invention includes the fusion of a polypeptide which increases or extends the serum half-life of the antibody construct to the N-terminus or to the C-terminus of the antibody construct. It is also conceivable that such insertion occurs within the antibody construct, e.g. between the first and the second domain.

[0907] The sites of greatest interest for amino acid modifications, particularly for amino acid substitutions, include the hypervariable regions, particularly the individual CDRs of the heavy and/or light chain, but FR alterations in the heavy and/or light chain are also contemplated. The substitutions can be conservative substitutions as described herein. Preferably, 1, 2, 3, 4, 5, 6, 7, 8, 9, or 10 amino acids may be substituted in a CDR, while 1, 2, 3, 4, 5, 6, 7, 8, 9, 10, 11, 12, 13, 14, 15, 16, 17, 18, 19, 20, or 25 amino acids may be substituted in the framework regions (FRs), depending on the length of the CDR or FR, respectively. For example, if a CDR sequence encompasses 6 amino acids, it is envisaged that one, two or three of these amino acids are substituted. Similarly, if a CDR sequence encompasses 15 amino acids it is envisaged that one, two, three, four, five or six of these amino acids are substituted.

[0908] A useful method for the identification of certain residues or regions within the antibody constructs that are preferred locations for mutagenesis is called “alanine scanning mutagenesis” and is described e.g. in Cunningham B C and Wells J. A. (Science. 1989 Jun. 2; 244(4908):1081-5). Here, a residue or group of residues within the antibody construct is/are identified (e.g. charged residues such as Arg, His, Lys, Asp, and Glu) and replaced by a neutral or non-polar amino acid (most preferably alanine or polyalanine) to affect the interaction of the respective amino acid(s) with the epitope of the target protein Alanine scanning is a technique used to determine the contribution of a specific residue to the stability or function of given protein. Alanine is used because of its non-bulky, chemically inert, methyl functional group that nevertheless mimics the secondary structure preferences that many of the other amino acids possess. Sometimes bulky amino acids such as valine or leucine can be used in cases where conservation of the size of mutated residues is needed. This technique can also be useful to determine whether the side chain of a specific residue plays a significant role in bioactivity. Alanine scanning is usually accomplished by site-directed mutagenesis or randomly by creating a PCR library. Furthermore, computational methods to estimate thermodynamic parameters based on theoretical alanine substitutions have been developed. The data can be tested by IR, NMR Spectroscopy, mathematical methods, bioassays, etc.

[0909] Those amino acid locations demonstrating functional sensitivity to the substitutions (as determined e.g. by alanine scanning) can then be refined by introducing further or other variants at, or for, the sites of substitution. Thus, while the site or region for introducing an amino acid sequence variation is predetermined, the nature of the mutation per se needs not to be predetermined. For example, to analyze or optimize the performance of a mutation at a given site, alanine scanning, or random mutagenesis may be conducted at a target codon or region, and the expressed antibody construct variants are screened for the optimal combination of desired activity. Techniques for making substitution mutations at predetermined sites in the DNA having a known sequence are well known, for example, M13 primer mutagenesis and PCR mutagenesis. Screening of the mutants is done e.g. using assays of antigen-binding activity and/or of cytotoxic activity.

[0910] Generally, if amino acids are substituted in one or more or all the CDRs of the heavy and/or light chain, it is envisaged that the then-obtained “substituted” sequence is at least 60% or 65%, more preferably 70% or 75%, even more preferably 80% or 85%, and particularly preferably 90% or 95% identical/homologous to the “original” or “parental” CDR sequence. This means that the degree of identity/homology between the original and the substituted sequence depends on the length of the CDR. For example, a CDR having 5 amino acids in total and comprising one amino acid substitution is 80% identical to the “original” or “parental” CDR sequence, while a CDR having 10 amino acids in total and comprising one amino acid substitution is 90% identical to the “original” or “parental” CDR sequence. Accordingly, the substituted CDRs of the antibody construct used in accordance with the invention may have different degrees of identity to their original sequences, e.g., CDRL1 may have 80%, while CDRL3 may have 90% of homology. The same considerations apply to the framework regions and to the entire VH and VL regions.

[0911] A “variant CDR” is a CDR with a specific sequence homology, similarity, or identity to the parent CDR used in accordance with the invention, and shares biological function with the parent CDR, including, but not limited to, at least 60%, 65%, 70%, 75%, 80%, 81%, 82%, 83%, 84%, 85%, 86%, 87%, 88%, 89%, 90%, 91%, 92%, 93%, 94%, 95%, 96%, 97%, 98%, or 99% of the specificity and/or activity of the parent CDR. Generally, the amino acid homology, similarity, or identity between individual variant CDRs is at least 60% to the parent sequences depicted herein, and more typically with increasing homologies, similarities or identities of at least 65% or 70%, preferably at least 75% or 80%, more preferably at least 85%, 90%, 91%, 92%, 93%, 94%, and most preferably 95%, 96%, 97%, 98%, 99%, and almost 100%. The same applies to “variant VH” and “variant VL”. According to one embodiment, the sequence variations within a “variant VH” and/or a “variant VL” do not extend to the CDRs. The present invention is hence directed to an antibody construct used in accordance with the disclosure herein, comprising VH and VL sequences having a certain sequence homology (see above) to the specific sequences as defined herein (the “parental” VH and VL), wherein the CDR sequences are 100% identical to the specific CDR sequences as defined herein (the “parental” CDRs).

[0912] Preferred substitutions (or replacements) are conservative substitutions. However, any substitution (including non-conservative substitutions or one or more from the “exemplary substitutions” listed in Table 1, below) is envisaged, as long as the antibody construct retains its capacity to bind to the target antigen(s) via the first domain and to CD3 or CD3 epsilon via the second domain, and/or provided its CDRs, FRs, VH and/or VL sequences have a degree of identity to the original or parental sequence of at least 60% or 65%, more preferably at least 70% or 75%, even more preferably at least 80% or 85%, and particularly preferably at least 90% or 95%.

[0913] A conservative replacement (also called a conservative mutation or a conservative substitution) is an amino acid replacement that changes a given amino acid to a different amino acid with similar biochemical properties (e.g. charge, hydrophobicity, size). Conservative replacements in proteins often have a smaller effect on protein function than non-conservative replacements. Conservative substitutions are shown in Table 1. Exemplary conservative substitutions are shown as “exemplary substitutions”. If such substitutions result in a change in biological activity, then more substantial changes, as further described herein with reference to amino acid classes, may be introduced and the products screened for a desired characteristic.

TABLE 1
Amino acid substitutions (aa = amino acid)

| Original | | |
|---|---|---|
| aa | Conservative substitutions | Exemplary Substitutions |
| Ala (A) | Small aa | Gly, Ser, Thr |
| Arg (R) | Polar aa, particularly Lys | Lys, Gln, Asn |
| Asn (N) | Polar aa, particularly Asp | Asp, Gln, His, Lys, Arg |
| Asp (D) | Glu or other polar aa, | Glu, Asn |
| | particularly Asn | |
| Cys (C) | Small aa | Ser, Ala |
| Gln (Q) | Polar aa, particularly Glu | Glu, Asn |
| Glu (E) | Asp or other polar aa, | Asp, Gln |
| | particularly Gln | |
| Gly (G) | Small aa, such as Ala | Ala |
| His (H) | | Asn, Gln, Arg, Lys, Tyr |
| Ile (I) | Hydrophobic, particularly | Ala, Val, Met, Leu, Phe |
| | aliphatic aa | |
| Leu (L) | Hydrophobic, particularly | Norleucine, Ile, Ala, Val, Met |
| | aliphatic aa | |
| Lys (K) | Polar aa, particularly Arg | Arg, Gln, Asn |
| Met (M) | Hydrophobic, particularly | Leu, Ala, Ile, Val, Phe |
| | aliphatic aa | |
| Phe (F) | Aromatic or hydrophobic aa, | Tyr, Trp, Leu, Val, Ile, Ala |
| | particularly Tyr | |
| Pro (P) | Small aa | Ala |
| Ser (S) | Polar or small aa, | Thr |
| | particularly Thr | |
| Thr (T) | Polar aa, particularly Ser | Ser |
| Trp (W) | Aromatic aa | Tyr, Phe |
| Tyr (Y) | Aromatic aa, particularly | Phe, Trp, Thr, Ser |
| | Phe | |
| Val (V) | Hydrophobic, particularly | Leu, Ile, Ala, Met, Phe |
| | aliphatic aa | |

[0914] Substantial modifications in the biological properties of the antibody construct used in accordance with the present invention are accomplished by selecting substitutions that differ significantly in their effect on maintaining (a) the structure of the polypeptide backbone in the region of the substitution, for example, as a sheet or helical conformation, (b) the charge or hydrophobicity of the molecule at the target site, or (c) the bulk of the side chain. Non-conservative substitutions will usually entail exchanging a member of one of the above defined amino acid classes (such as polar, neutral, acidic, basic, aliphatic, aromatic, small . . . ) for another class. Any cysteine residue not involved in maintaining the proper conformation of the antibody construct may be substituted, generally with senile, to improve the oxidative stability of the antibody construct.

[0915] Sequence identity, homology and/or similarity of amino acid sequences is determined by using standard techniques known in the art, including, but not limited to, the local sequence identity algorithm of Smith and Waterman, 1981, Adv. Appl. Math. 2:482, the sequence identity alignment algorithm of Needleman and Wunsch (J Mol Biol. 1970 March; 48(3):443-53), the search for similarity method of Pearson and Lipman (Proc Natl Acad Sci USA. 1988 April; 85(8):2444-8), computerized implementations of these algorithms (GAP, BESTFIT, FASTA, and TFASTA in the Wisconsin Genetics Software Package, Genetics Computer Group, 575 Science Drive, Madison, Wis.), the Best Fit sequence program described by Devereux et al. (Nucleic Acids Res. 1984 Jan. 11; 12(1 Pt 1):387-95), preferably using the default settings, or by inspection. It is envisaged that percent identity is calculated by FastDB based upon the following parameters: mismatch penalty of 1; gap penalty of 1; gap size penalty of 0.33; and joining penalty of 30. See also “Current Methods in Sequence Comparison and Analysis,” Macromolecule Sequencing and Synthesis, Selected Methods and Applications, pp 127-149 (1988), Alan R. Liss, Inc.

[0916] An example of a useful algorithm is PILEUP. PILEUP creates a multiple sequence alignment from a group of related sequences using progressive, pairwise alignments. It can also plot a tree showing the clustering relationships used to create the alignment. PILEUP uses a simplification of the progressive alignment method of Feng and Doolittle (J Mol Evol. 1987; 25(4):351-60); the method is similar to that described by Higgins and Sharp (Comput Appl Biosci. 1989 April; 5(2):151-3). Useful PILEUP parameters include a default gap weight of 3.00, a default gap length weight of 0.10, and weighted end gaps.

[0917] Another example of a useful algorithm is the BLAST algorithm, described in: Altschul et al. (J Mol Biol. 1990 Oct. 5; 215(3):403-10); Altschul et al., (Nucleic Acids Res. 1997 Sep. 1; 25(17):3389-402); and Karlin and Altschul (Proc Natl Acad Sci USA. 1993 Jun. 15; 90(12):5873-7). A particularly useful BLAST program is the WU-Blast-2 program which was obtained from Altschul et al., (Methods Enzymol. 1996; 266:460-80). WU-Blast-2 uses several search parameters, most of which are set to the default values. The adjustable parameters are set with the following values: overlap span=1, overlap fraction=0.125, word threshold (T)=II. The HSP S and HSP S2 parameters are dynamic values and are established by the program itself depending upon the composition of the specific sequence and composition of the respective database against which the sequence of interest is being searched; however, the values may be adjusted to increase sensitivity.

[0918] An additional useful algorithm is gapped BLAST as reported by Altschul et al. (Nucleic Acids Res. 1997 Sep. 1; 25(17):3389-402). Gapped BLAST uses BLOSUM-62 substitution scores; threshold T parameter set to 9; the two-hit method to trigger ungapped extensions, charges gap lengths of k a cost of 10+k; Xu set to 16, and Xg set to 40 for database search stage and to 67 for the output stage of the algorithms. Gapped alignments are triggered by a score corresponding to about 22 bits.

[0919] In line herewith, the term “percent (%) nucleic acid sequence identity/homology/similarity” with respect to the nucleic acid sequence encoding the antibody constructs identified herein is defined as the percentage of nucleotide residues in a candidate sequence that are identical with the nucleotide residues in the coding sequence of the antibody construct. One method to align two sequences and thereby determine their homology uses the BLASTN module of WU-Blast2 set to the default parameters, with overlap span and overlap fraction set to 1 and 0.125, respectively. Generally, the nucleic acid sequence homology, similarity, or identity between the nucleotide sequences encoding individual variant CDRs and the nucleotide sequences depicted herein are at least 60%, and more typically with increasing homologies, similarities or identities of at least 65%, 70%, 75%, 80%, 81%, 82%, 83%, 84%, 85%, 86%, 87%, 88%, 89%, 90%, 91%, 92%, 93%, 94%, 95%, 96%, 97%, 98%, or 99%, and almost 100%. Again, the same applies to nucleic acid sequence encoding the “variant VH” and/or “variant VL”.

[0920] In one embodiment, the percentage of identity to human germline of the antibody constructs used in accordance with the invention, or of the first and second domain (binding domains) of these antibody constructs, is ≥70% or ≥75%, more preferably ≥80% or ≥85%, even more preferably ≥90%, and most preferably ≥91%, ≥92%, ≥93%, ≥94%, ≥95% or even ≥96%. Identity to human antibody germline gene products is thought to be an important feature to reduce the risk of therapeutic proteins to elicit an immune response against the drug in the patient during treatment. Hwang W. Y. and Foote J. (Methods. 2005 May; 36(1):3-10) demonstrate that the reduction of non-human portions of drug antibody constructs leads to a decrease of risk of inducing anti-drug antibodies in the patients during treatment. By comparing an exhaustive number of clinically evaluated antibody drugs and the respective immunogenicity data, the trend is shown that humanization of the variable regions of antibodies/antibody constructs makes the protein less immunogenic (average 5.1% of patients) than antibodies/antibody constructs carrying unaltered non-human variable regions (average 23.59% of patients). Higher degrees of identity to human sequences are hence desirable for protein therapeutics based on variable regions and in the form of antibody constructs. To determine the germline identity, the V-regions of VL can be aligned with the amino acid sequences of human germline V segments and J segments (http://www2.mrc-lmb.cam.ac.uk/vbase/) using Vector NTI software and the amino acid sequence calculated by dividing the identical amino acid residues by the total number of amino acid residues of the VL in percent. The same can be done for the VH segments (http://www2.mrc-lmb.cam.ac.uk/vbase/) with the exception that the VH CDR3 may be excluded due to its high diversity and a lack of existing human germline VH CDR3 alignment partners. Recombinant techniques can then be used to increase sequence identity to human antibody germline genes.

[0921] In a further embodiment, the antibody constructs used in accordance with the present invention exhibit high monomer yields under standard research scale conditions, e.g., in a standard two-step purification process. It is envisaged that the monomer yield of the antibody constructs used in accordance with the invention is ≥0.25 mg/L supernatant (SN), preferably ≥0.5 mg/L SN, more preferably ≥1 mg/L SN, even more preferably ≥2 mg/L SN and most preferably ≥3 mg/L SN. The yield of the antibody construct denominated “CL-1×I2C-6His” was shown to be 4.1 mg/L supernatant, and the yield of the antibody construct denominated “CL-1×I2C-scFc” was shown to be 36.5 mg/L supernatant.

[0922] Likewise, the yield of the dimeric antibody construct isoforms and hence the monomer percentage (i.e., monomer: (monomer+dimer)) of the antibody constructs can be determined. The productivity of monomeric and dimeric antibody constructs and the calculated monomer percentage can e.g. be obtained in the SEC purification step of culture supernatant from standardized research-scale production in roller bottles. According to one embodiment, the monomer percentage of the antibody constructs used in accordance with the invention is ≥80%, more preferably ≥85%, even more preferably ≥90%, and most preferably ≥95%.

[0923] According to one embodiment, the antibody constructs used in accordance with the invention have a plasma stability (ratio of EC50 with plasma to EC50 w/o plasma) of ≤5 or ≤4, more preferably ≤3.5 or ≤3, even more preferably ≤2.5 or ≤2, and most preferably ≤1.5 or ≤1. The plasma stability of an antibody construct can be tested by incubation of the purified construct in human plasma at 37° C. for 24 to 96 hours, e.g. at a concentration of 2-20 μg/ml, followed by EC50 determination in an 18 h 51-chromium release or in a 48 h FACS cytotoxicity assay. The effector cells in the cytotoxicity assay can be stimulated enriched human CD8 positive T cells (preferred) or unstimulated human PBMC. Target cells can e.g. be CHO cells transfected with human the target antigen(s). The effector to target cell (E:T) ratio can be 10:1. The starting concentration of the antibody constructs in the cytotoxicity assay can be 0.01-0.1 μg/ml. The human plasma pool used for this purpose is derived from the blood of healthy donors collected by EDTA coated syringes. Cellular components are removed by centrifugation and the upper plasma phase is collected and subsequently pooled. As control, non-incubated antibody constructs are diluted immediately prior to the cytotoxicity assay in appropriate medium such as RPMI-1640. The plasma stability is calculated as ratio of EC50 (after plasma incubation) to EC50 (control/no incubation).

[0924] It is furthermore envisaged that the monomer to dimer conversion of the antibody constructs used in accordance with the invention is low. The conversion can be measured under different conditions and analyzed by high performance size exclusion chromatography. For example, incubation of the monomeric isoforms of the antibody constructs can be carried out for 7 days at 37° C. in generic formulation buffer and at concentrations of e.g. 100 μg/ml or 250 μg/ml in an incubator, followed by high performance SEC to determine the percentage of initially monomeric antibody construct which had been converted into dimeric antibody construct. Under these conditions, it is envisaged that the antibody constructs used in accordance with the invention show a dimer percentage that is ≤8%, preferably ≤6%, more preferably ≤5%, more preferably ≤4%, even more preferably ≤3%, even more preferably ≤2.5%, even more preferably ≤2%, even more preferably ≤1.5%, and most preferably ≤1% or ≤0.5% or even 0%.

[0925] It is likewise envisaged that the antibody constructs used in accordance with the present invention present with very low dimer conversion after several freeze/thaw cycles. For example, the antibody construct monomer is adjusted to a concentration of 250 μg/ml e.g. in generic formulation buffer and subjected to three freeze/thaw cycles (freezing at −80° C. for 30 min followed by thawing for 30 min at room temperature), followed by high performance SEC to determine the percentage of initially monomeric antibody construct which had been converted into dimeric antibody construct. It is envisaged that the dimer percentages of the antibody constructs are ≤8%, preferably ≤6%, more preferably ≤5%, more preferably ≤4%, even more preferably ≤3%, even more preferably ≤2.5%, even more preferably ≤2%, even more preferably ≤1.5%, and most preferably ≤1% or ≤0.5% or even 0%, for example after three freeze/thaw cycles.

[0926] According to one embodiment, the antibody constructs used in accordance with the present invention show a favorable thermostability with aggregation temperatures ≥45° C. or ≥46° C., more preferably ≥47° C. or ≥48° C., even more preferably ≥49° C. or ≥50° C., and most preferably ≥51° C. The thermostability parameter can be determined in terms of antibody aggregation temperature as follows: Antibody solution at a concentration 250 μg/ml is transferred into a single use cuvette and placed in a dynamic light scattering (DLS) device. The sample is heated from 40° C. to 70° C. at a heating rate of 0.5° C./min with constant acquisition of the measured radius. Increase of radius indicating melting of the protein and aggregation is used to calculate the aggregation temperature of the antibody.

[0927] Alternatively, temperature melting curves can be determined by differential scanning calorimetry (DSC) to determine intrinsic biophysical protein stabilities of the antibody constructs. These experiments can be performed using a MicroCal LLC VP-DSC device. The energy uptake of a sample containing an antibody construct is recorded from 20° C. to 90° C. compared to a sample containing only the formulation buffer. The antibody constructs are adjusted to a final concentration of 250 μg/ml e.g. in SEC running buffer. For recording of the respective melting curve, the overall sample temperature is increased stepwise. Energy uptake of the sample and the formulation buffer reference is recorded at each temperature. The difference in energy uptake Cp (kcal/mole/° C.) of the sample minus the reference is plotted against the respective temperature. The melting temperature is defined as the temperature at the first maximum of energy uptake.

[0928] The antibody constructs used in accordance with the invention are also envisaged to have a turbidity of ≤0.2 or ≤0.15, preferably of ≤0.10 or ≤0.08, more preferably of ≤0.06 or ≤0.05, and most preferably of ≤0.04 or ≤0.03. The turbidity can be measured by OD340 at a concentration of the antibody construct of 2.5 mg/ml and 16 h incubation at 5° C.

[0929] Changes in the potency of a target×CD3 antibody construct as a function of preincubation of the construct on the target cells in the absence of T cells can be measured. If an antibody construct is internalized, it is expected to undergo lysosomal degradation. The effective concentration is hence expected to decrease over time, and thus the apparent potency should decrease as well. The effect has been observed with some targets, for which this is a known phenomenon. Antibody constructs used in accordance with the invention are envisaged to not be internalized or to not undergo significant internalization by the target cell. The rate of internalization can be assayed e.g. as described in the following: T cells are counted and diluted to a concentration of 1×105/ml in assay media. Target positive target cells are counted and plated e.g. at 2500 cells per well (cpw). The antibody construct is diluted serially 1:2, e.g. at a starting concentration of 100 nM. The antibody construct is added to the culture assay plates to allow for 0 hours, 1 hour or 2 hours of incubation prior to addition of the T cells. Then the T cells are plated at 25000 cpw (E:T=10:1), and the assay is incubated for 48 hours at 37° C. Target cell survival is analyzed e.g. with the Steady-Glo® system (25 μl/well). Preferably, the internalization rate (e.g. measured as a decrease in cytotoxicity) is ≤20% after a 2-hour (pre-)incubation of the antibody construct with the target cell, more preferably ≤15%, even more preferably ≤10%, and most preferably ≤5%.

[0930] It is furthermore envisaged for an antibody construct used in accordance with the invention that shed or soluble target does not significantly impair its efficacy or biologic activity. This can be measured e.g. in a cytotoxicity assay where soluble target is added at increasing concentrations to the assay, e.g. at 0 nM-0.3 nM-0.7 nM-1 nM-3 nM-7 nM-12 nM. An exemplary E:T value is 10:1. The EC50 value of the tested antibody construct should not be significantly increased in the presence of soluble target.

[0931] In a further embodiment, the antibody construct used in accordance with the invention is stable at acidic pH. The more tolerant the antibody construct behaves at unphysiologic pH such as pH 5.5 (a pH which is required to run e.g. a cation exchange chromatography), the higher is the recovery of the antibody construct eluted from an ion exchange column relative to the total amount of loaded protein. Recovery of the antibody construct from an ion (e.g., cation) exchange column at pH 5.5 is preferably ≥30%, more preferably ≥40%, more preferably ≥50%, even more preferably ≥60%, even more preferably ≥70%, even more preferably ≥80%, and most preferably ≥95%. The percentage represents the area under the curve (=AUC) of the main peak.

[0932] It is furthermore envisaged that the antibody constructs used in accordance with the present invention exhibit therapeutic efficacy, which manifests as anti-tumor activity or tumor growth inhibition. In one embodiment, the tumor growth inhibition of the antibody construct used in accordance with the invention T/C [%] is ≤70, ≤60, ≤50, ≤40, ≤30, ≤20, ≤10, ≤5, ≤4, ≤3, or ≤2. Modification or adjustment of certain parameters of these studies (such as the number of injected tumor cells, the site of injection, the number of transplanted human T cells, the amount of antibody constructs to be administered, and the timelines) is also envisaged, while still arriving at a meaningful and reproducible result.

[0933] The invention further provides a polynucleotide/nucleic acid molecule encoding an antibody construct used in accordance with the invention. Nucleic acid molecules are biopolymers composed of nucleotides. A polynucleotide is a biopolymer composed of 13 or more nucleotide monomers covalently bonded in a chain. DNA (such as cDNA) and RNA (such as mRNA) are examples of polynucleotides/nucleic acid molecules with distinct biological function. Nucleotides are organic molecules that serve as the monomers or subunits of nucleic acid molecules like DNA or RNA. The nucleic acid molecule or polynucleotide can be double stranded or single stranded, linear or circular. It is envisaged that the nucleic acid molecule or polynucleotide is comprised in a vector. It is furthermore envisaged that such vector is comprised in a host cell. Said host cell is, e.g. after transformation or transfection with the vector or the polynucleotide/nucleic acid molecule, capable of expressing the antibody construct. For this purpose, the polynucleotide or nucleic acid molecule is operatively linked with control sequences.

[0934] The genetic code is the set of rules by which information encoded within genetic material (nucleic acids) is translated into proteins. Biological decoding in living cells is accomplished by the ribosome which links amino acids in an order specified by mRNA, using tRNA molecules to carry amino acids and to read the mRNA three nucleotides at a time. The code defines how sequences of these nucleotide triplets, called codons, specify which amino acid will be added next during protein synthesis. With some exceptions, a three-nucleotide codon in a nucleic acid sequence specifies a single amino acid. Because most genes are encoded with the same code, this code is often referred to as the canonical or standard genetic code.

[0935] Degeneracy of codons is the redundancy of the genetic code, exhibited as the multiplicity of three-base pair codon combinations that specify an amino acid. Degeneracy results because there are more codons than encodable amino acids. The codons encoding one amino acid may differ in any of their three positions; however, often this difference is in the second or third position. For instance, codons GAA and GAG both specify glutamic acid and exhibit redundancy; but, neither specifies any other amino acid and thus demonstrate no ambiguity. The genetic codes of different organisms can be biased towards using one of the several codons that encode the same amino acid over the others—that is, a greater frequency of one will be found than expected by chance. For example, leucine is specified by six distinct codons, some of which are rarely used. Codon usage tables detailing genomic codon usage frequencies for most organisms are available. Recombinant gene technologies commonly take advantage of this effect by implementing a technique termed codon optimization, in which those codons are used to design a polynucleotide which are preferred by the respective host cell (such as a cell of human hamster origin, an Escherichia coli cell, or a Saccharomyces cerevisiae cell), e.g. to increase protein expression. It is hence envisaged that the polynucleotides/nucleic acid molecules of the present disclosure are codon optimized. Nevertheless, the polynucleotide/nucleic acid molecule encoding an antibody construct used in accordance with the invention may be designed using any codon that encodes the desired amino acid.

[0936] According to one embodiment, the polynucleotide/nucleic acid molecule encoding the antibody construct used in accordance with the invention is in the form of one single molecule or in the form of two or more separate molecules. If the antibody construct used in accordance with the present invention is a single chain antibody construct, the polynucleotide/nucleic acid molecule encoding such construct will most likely also be in the form of one single molecule. However, it is also envisaged that different components of the antibody construct (such as the different domains, e.g. the domain which binds to the target antigen(s), the domain which binds to CD3, and/or further domains such as antibody constant domains) are located on separate polypeptide chains, in which case the polynucleotide/nucleic acid molecule is most likely in the form of two or more separate molecules.

[0937] The same applies for the vector comprising a polynucleotide/nucleic acid molecule. If the antibody construct used in accordance with the present invention is a single chain antibody construct, one vector may comprise the polynucleotide which encodes the antibody construct in one single location (as one single open reading frame, ORF). One vector may also comprise two or more polynucleotides/nucleic acid molecules at separate locations (with individual ORFs), each one of them encoding a different component of the antibody construct used in accordance with the invention. It is envisaged that the vector comprising the polynucleotide/nucleic acid molecule of the present invention is in the form of one single vector or two or more separate vectors. In one embodiment, and for the purpose of expressing the antibody construct in a host cell, the host cell should comprise the polynucleotide/nucleic acid molecule encoding the antibody construct or the vector comprising such polynucleotide/nucleic acid molecule in their entirety, meaning that all components of the antibody construct—whether encoded as one single molecule or in separate molecules/locations—will assemble after translation and form together the biologically active antibody construct used in accordance with the invention.

[0938] Also disclosed herein is a vector comprising a polynucleotide/nucleic acid molecule used in accordance with the invention. A vector is a nucleic acid molecule used as a vehicle to transfer (foreign) genetic material into a cell, usually to ensure the replication and/or expression of the genetic material. The term “vector” encompasses—but is not restricted to—plasmids, viruses, cosmids, and artificial chromosomes. Some vectors are designed specifically for cloning (cloning vectors), others for protein expression (expression vectors). So-called transcription vectors are mainly used to amplify their insert. The manipulation of DNA is normally conducted on E. coli vectors, which contain elements necessary for their maintenance in E. coli. However, vectors may also have elements that allow them to be maintained in another organism such as yeast, plant or mammalian cells, and these vectors are called shuttle vectors. Insertion of a vector into the target or host cell is usually called transformation for bacterial cells and transfection for eukaryotic cells, while insertion of a viral vector is often called transduction.

[0939] In general, engineered vectors comprise an origin of replication, a multicloning site and a selectable marker. The vector itself is generally a nucleotide sequence, commonly a DNA sequence, that comprises an insert (transgene) and a larger sequence that serves as the “backbone” of the vector. While the genetic code determines the polypeptide sequence for a given coding region, other genomic regions can influence when and where these polypeptides are produced. Modem vectors may therefore encompass additional features besides the transgene insert and a backbone: promoter, genetic marker, antibiotic resistance, reporter gene, targeting sequence, protein purification tag. Vectors called expression vectors (expression constructs) specifically are for the expression of the transgene in the target cell, and generally have control sequences.

[0940] The term “control sequences” refers to DNA sequences necessary for the expression of an operably linked coding sequence in a specific host organism. The control sequences that are suitable for prokaryotes, for example, include a promoter, optionally also an operator sequence, and a ribosome binding site. Eukaryotic cells are known to utilize promoters, polyadenylation signals, a Kozak sequence and enhancers.

[0941] A nucleic acid is “operably linked” when it is placed into a functional relationship with another nucleic acid sequence. For example, DNA for a presequence or secretory leader is operably linked to DNA for a polypeptide if it is expressed as a preprotein that participates in the secretion of the polypeptide; a promoter or enhancer is operably linked to a coding sequence if it affects the transcription of the sequence; or a ribosome binding site is operably linked to a coding sequence if it is positioned to facilitate translation. Generally, “operably linked” means that the nucleotide sequences being linked are contiguous, and, in the case of a secretory leader, contiguous and in reading phase. However, enhancers do not have to be contiguous. Linking is accomplished by ligation at convenient restriction sites. If such sites do not exist, the synthetic oligonucleotide adaptors or linkers are used in accordance with conventional practice.

[0942] “Transfection” is the process of deliberately introducing nucleic acid molecules or polynucleotides (including vectors) into target cells. The term is mostly used for non-viral methods in eukaryotic cells. Transduction is often used to describe virus-mediated transfer of nucleic acid molecules or polynucleotides. Transfection of animal cells typically involves opening transient pores or “holes” in the cell membrane, to allow the uptake of material. Transfection can be carried out using biological particles (such as viral transfection, also called viral transduction), chemical-based methods (such as using calcium phosphate, lipofection, Fugene, cationic polymers, nanoparticles) or physical treatment (such as electroporation, microinjection, gene gun, cell squeezing, magnetofection, hydrostatic pressure, impalefection, sonication, optical transfection, heat shock).

[0943] The term “transformation” is used to describe non-viral transfer of nucleic acid molecules or polynucleotides (including vectors) into bacteria, and into non-animal eukaryotic cells, including plant cells. Transformation is hence the genetic alteration of a bacterial or non-animal eukaryotic cell resulting from the direct uptake through the cell membrane(s) from its surroundings and subsequent incorporation of exogenous genetic material (nucleic acid molecules). Transformation can be achieved by artificial means. For transformation to happen, cells or bacteria must be in a state of competence, which might occur as a time-limited response to environmental conditions such as starvation and cell density and can also be artificially induced.

[0944] Moreover, disclosed is a host cell transformed or transfected with the polynucleotide/nucleic acid molecule used in accordance with the invention or with the vector used in accordance with the invention.

[0945] As used herein, the terms “host cell” or “recipient cell” are intended to include any individual cell or cell culture that can be or has been recipient of vectors, exogenous nucleic acid molecules and/or polynucleotides encoding the antibody construct used in accordance with the present invention; and/or recipients of the antibody construct itself. The introduction of the respective material into the cell is carried out by way of transformation, transfection and the like (vide supra). The term “host cell” is also intended to include progeny or potential progeny of a single cell. Because certain modifications may occur in succeeding generations due to either natural, accidental, or deliberate mutation or due to environmental influences, such progeny may not, in fact, be completely identical (in morphology or in genomic or total DNA complement) to the parent cell but is still included within the scope of the term as used herein. Suitable host cells include prokaryotic or eukaryotic cells and include—but are not limited to—bacteria (such as E. coli), yeast cells, fungi cells, plant cells, and animal cells such as insect cells and mammalian cells, e.g., hamster, murine, rat, macaque or human.

[0946] In addition to prokaryotes, eukaryotic microbes such as filamentous fungi or yeast are suitable cloning or expression hosts for the antibody construct used in accordance with the invention. Saccharomyces cerevisiae, or common baker's yeast, is the most commonly used among lower eukaryotic host microorganisms. However, a number of other genera, species, and strains are commonly available and useful herein, such as Schizosaccharomyces pombe, Kluyveromyces hosts such as K. lactis, K. fragilis (ATCC 12424), K. bulgaricus (ATCC 16045), K. wickeramii (ATCC 24178), K. waltii (ATCC 56500), K. drosophilarum (ATCC 36906), K. thermotolerans, and K. marxianus; yarrowia (EP 402 226); Pichia pastoris (EP 183 070); Candida; Trichoderma reesia (EP 244 234); Neurospora crassa; Schwanniomyces such as Schwanniomyces occidentalis; and filamentous fungi such as Neurospora, Penicillium, Tolypocladium, and Aspergillus hosts such as A. nidulans and A. niger.

[0947] Suitable host cells for the expression of a glycosylated antibody construct are derived from multicellular organisms. Examples of invertebrate cells include plant and insect cells. Numerous baculoviral strains and variants and corresponding permissive insect host cells from hosts such as Spodoptera frugiperda (caterpillar), Aedes aegypti (mosquito), Aedes albopictus (mosquito), Drosophila melanogaster (fruit fly), and Bombyx mori (silkmoth) have been identified. A variety of viral strains for transfection are publicly available, e.g., the L-1 variant of Autographa californica NPV and the Bm-5 strain of Bombyx mori NPV, and such viruses may be used as the virus, particularly for transfection of Spodoptera frugiperda cells.

[0948] Plant cell cultures of cotton, corn, potato, soybean, petunia, tomato, Arabidopsis and tobacco can also be used as hosts. Cloning and expression vectors useful in the production of proteins in plant cell culture are known to those of skill in the art. See e.g. Hiatt et al., Nature (1989) 342: 76-78, Owen et al. (1992) Bio/Technology 10: 790-794, Artsaenko et al. (1995) The Plant J 8: 745-750, and Fecker et al. (1996) Plant Mol Biol 32: 979-986.

[0949] However, interest has been greatest in vertebrate cells, and propagation of vertebrate cells in culture (cell culture) has become a routine procedure. Examples of useful mammalian host cell lines are monkey kidney CV1 line transformed by SV40 (such as COS-7, ATCC CRL 1651); human embryonic kidney line (such as 293 or 293 cells subcloned for growth in suspension culture, Graham et al., J. Gen Virol. 36: 59 (1977)); baby hamster kidney cells (such as BHK, ATCC CCL 10); Chinese hamster ovary cells/-DHFR (such as CHO, Urlaub et al., Proc. Natl. Acad. Sci. USA 77: 4216 (1980)); mouse sertoli cells (such as TM4, Mather, Biol. Reprod. 23: 243-251 (1980)); monkey kidney cells (such as CVI ATCC CCL 70); African green monkey kidney cells (such as VERO-76, ATCC CRL1587); human cervical carcinoma cells (such as HELA, ATCC CCL 2); canine kidney cells (such as MDCK, ATCC CCL 34); buffalo rat liver cells (such as BRL 3A, ATCC CRL 1442); human lung cells (such as W138, ATCC CCL 75); human liver cells (such as Hep G2,1413 8065); mouse mammary tumor (such as MMT 060562, ATCC CCL-51); TRI cells (Mather et al., Annals N. Y Acad. Sci. (1982) 383: 44-68); MRC 5 cells; FS4 cells; and a human hepatoma line (such as Hep G2).

[0950] Also disclosed herein is a process for producing an antibody construct used in accordance with the invention, said process comprising culturing a host cell n under conditions allowing the expression of the antibody construct used in accordance with the invention and recovering the produced antibody construct from the culture.

[0951] As used herein, the term “culturing” refers to the in vitro maintenance, differentiation, growth, proliferation and/or propagation of cells under suitable conditions in a medium. Cells are grown and maintained in a cell growth medium at an appropriate temperature and gas mixture. Culture conditions vary widely for each cell type. Typical growth conditions are a temperature of about 37° C., a CO2 concentration of about 5% and a humidity of about 95%. Recipes for growth media can vary e.g. in pH, concentration of the carbon source (such as glucose), nature and concentration of growth factors, and the presence of other nutrients (such as amino acids or vitamins). The growth factors used to supplement media are often derived from the serum of animal blood, such as fetal bovine serum (FBS), bovine calf serum (FCS), equine serum, and porcine serum. Cells can be grown either in suspension or as adherent cultures. There are also cell lines that have been modified to be able to survive in suspension cultures, so they can be grown to a higher density than adherent conditions would allow.

[0952] The term “expression” includes any step involved in the production of an antibody construct used in accordance with the invention including, but not limited to, transcription, post-transcriptional modification, translation, folding, post-translational modification, targeting to specific subcellular or extracellular locations, and secretion. The term “recovering” refers to a series of processes intended to isolate the antibody construct from the cell culture. The “recovering” or “purification” process may separate the protein and non-protein parts of the cell culture, and finally separate the desired antibody construct from all other polypeptides and proteins. Separation steps usually exploit differences in protein size, physico-chemical properties, binding affinity and biological activity. Preparative purifications aim to produce a relatively large quantity of purified proteins for subsequent use, while analytical purification produces a relatively small amount of a protein for a variety of research or analytical purposes.

[0953] When using recombinant techniques, the antibody construct can be produced intracellularly, in the periplasmic space, or directly secreted into the medium. If the antibody construct is produced intracellularly, as a first step, the particulate debris, either host cells or lysed fragments, are removed, for example, by centrifugation or ultrafiltration. The antibody construct used in accordance with the invention may e.g. be produced in bacteria such as E. coli. After expression, the construct is isolated from the bacterial cell paste in a soluble fraction and can be purified e.g. via affinity chromatography and/or size exclusion. Final purification can be carried out in a manner that is similar to the process for purifying an antibody construct expressed in mammalian cells and secreted into the medium. Carter et al. (Biotechnology (NY) 1992 February; 10(2):163-7) describe a procedure for isolating antibodies which are secreted to the periplasmic space of E. coli.

[0954] Where the antibody is secreted into the medium, supernatants from such expression systems are generally first concentrated using a commercially available protein concentration filter, for example, an ultrafiltration unit.

[0955] The antibody construct used in accordance with the invention prepared from the host cells can be recovered or purified using, for example, hydroxylapatite chromatography, gel electrophoresis, dialysis, and affinity chromatography. Other techniques for protein purification such as fractionation on an ion-exchange column, mixed mode ion exchange, HIC, ethanol precipitation, size exclusion chromatography, reverse phase HPLC, chromatography on silica, chromatography on heparin sepharose, chromatography on an anion or cation exchange resin (such as a polyaspartic acid column), immunoaffinity (such as Protein A/G/L) chromatography, chromato-focusing, SDS-PAGE, ultracentrifugation, and ammonium sulfate precipitation are also available depending on the antibody construct to be recovered.

[0956] A protease inhibitor may be included in any of the foregoing steps to inhibit proteolysis, and antibiotics may be included to prevent the growth of contaminants.

[0957] According to the invention, the combination therapy or combination products/compositions comprise an inhibitor/antagonist of TNF/TNFR. INF is a cytokine that is involved in inflammation and regulation of the immune system. It is mainly produced by activated macrophages and well-known in the art (Holbrook, J. et al., F1000Research 2019, 8(F1000 Faculty Rev):111). Human TNF binds to two receptors, TNFR1 and TNFR2, respectively. While TNFR1 is expressed on essentially all human tissues, expression of TNFR2 is primarily confined to cells of the immune system, neurons, and endothelial cells. Interaction of TNF with its receptors results in conformational changes and binding to its receptor(s) induces, depending on the type of receptor (TNFR1 or TNFR2) and different signaling cascades, e.g., cell death by apoptosis or necrosis, but also cell proliferation, tissue regeneration and inflammation. Agonists/inhibitors of TNF, e.g., infliximab, etanercept, etc., are used as drugs in the treatment of various diseases such as autoimmune diseases (Rheumatoid Arthritis, Crohn's Disease, Ankylosing Spondylitis, etc.; Sedger and McDermott, Cytokine & Growth Factor Reviews 25 (2014) 453-472). In one particular embodiment of the invention, the antagonist/inhibitor of TNF/TNFR-mediated signaling is etanercept that is used in combination with an antibody construct as defined in any one of the preceding paragraphs.

[0958] Moreover, the invention provides a pharmaceutical composition or formulation comprising an antibody construct used in accordance with the invention or an antibody construct produced according to the process disclosed herein in combination with an inhibitor/antagonist of TNF/TNFR.

[0959] As used herein, an “inhibitor” or “antagonist” of TNF/TNFR is capable of completely or partially blocking or reducing TNF/TNFR-signaling. In embodiments of the invention, the “inhibitor” or “antagonist” of TNF/TNFR blocks signaling by at least 10%, at least 20%, at least 30%, at least 40%, at least 50%, at least 60%, at least 70%, at least 80%, at least 90%, at least 95%, or completely, i.e. the effects based on TNF/TNFR-signaling that can be measured using suitable assays are no longer or only partially detectable. Suitable assays for the measurement of TNF/TNFR-signaling are, for example, based on the detection of TNFR-induced activation of NF-□B, but any other reliable and art-recognized test in vitro can be used (see also Chapter 4 of Z̆igon-Branc, Barlic̆ and Jeras' publication in IntechOpen entitled: In vitro Cell-Based Assays for Potency Testing of Anti-TNF-α Biological Drugs; Mar. 25, 2019 and references cited therein). “Reducing” has its commonly accepted meaning, i.e. the amount of a given parameter (number, signaling activity, etc.) is lowered compared to the status without exposure to a herein described inhibitor/antagonist.

[0960] Examples of “inhibitors” or “antagonists” of TNF/TNFR signaling are FDA)- and EMA-approved originator and biosimilar anti-TNF drugs, i.e. full-length monoclonal antibodies (mAbs) infliximab (IFX), a chimeric mouse/human mAb (Remicade® and its biosimilars: Remsima®, Inflectra®, Flixabi®, Ixifi®, Renflexis®, and Zessly®), adalimumab (ADA), a fully humanized mAb (Humira® and its biosimilars: Cyltezo®, Imraldi®, Amgevita®, Solymbic®, Hyrimoz®, Hulio®, Halimatoz®, and Heyifa®), and golimumab, another fully humanized mAb (Simponi®). The additional two anti-TNF biological drugs, which are not mAbs, are etanercept (ETA) (Enbrel® and its biosimilars: Erelzi® and Benepali®), a fusion protein consisting of two extracellular parts of the human TNFR2 and the Fc portion of human IgG1, and certolizumab pegol (Cimzia®) composed of a human Fab′ fragment, covalently attached to two cross-linked 20 kDa polyethylene glycol chains.

[0961] According to one embodiment of the present invention, the pharmaceutical compositions comprises an antagonist/inhibitor of TNF/TNFR-mediated signaling, which is preferably etanercept in combination with an antibody construct as defined in any one of the preceding paragraphs.

[0962] As used herein, an “inhibitor” or “antagonist” of interleukin 6 and the interleukin 6 receptor (IL6 and IL6R) is capable of completely or partially blocking or reducing IL6/IL6R-signaling. In embodiments of the invention, the “inhibitor” or “antagonist” of IL6/IL6R blocks signaling by at least 10%, at least 20%, at least 30%, at least 40%, at least 50%, at least 60%, at least 70%, at least 80%, at least 90%, at least 95%, or completely, i.e. the effects based on IL6/IL6R-signaling that can be measured using suitable assays are no longer or only partially detectable. Suitable assays for the measurement of IL6/IL6R-signaling are, for example, based on the detection of IL-6 binding to the non-signal transducing IL-6 receptor (IL-6R), followed by complex formation with the signal-transducing coreceptor glycoprotein 130 (gp130) as disclosed in Baran et al. (http://www.jbc.org/cgi/doi/10.1074/jbc.RA117.001163).

[0963] As used herein, the term “pharmaceutical composition” relates to a composition which is suitable for administration to a patient, preferably a human patient. The particularly preferred pharmaceutical composition of this invention comprises one or a plurality of the antibody construct(s) used in accordance with the invention, preferably in a therapeutically effective amount, in combination with an inhibitor/antagonist of TNF/TNFR, preferably in a therapeutically effective amount. Preferably, the pharmaceutical composition further comprises suitable formulations of one or more (pharmaceutically effective) carriers, stabilizers, excipients, diluents, solubilizers, surfactants, emulsifiers, preservatives and/or adjuvants. Acceptable constituents of the composition are preferably nontoxic to recipients at the dosages and concentrations employed. Pharmaceutical compositions of the invention include, but are not limited to, liquid, frozen, and lyophilized compositions. The pharmaceutical compositions according to the present invention are combination products that may be combined to form a single pharmaceutical composition immediately prior to their administration to a patient in need thereof. Alternatively, the combination products may be prepared as pharmaceutical compostions by the manufacturer and may be ready used. This includes also combination products that must be reconstituted, diluted, or otherwise handled prior to use, but which contain already the active ingredients disclosed herein, i.e. one or a plurality of the antibody construct(s) used in accordance with the invention, preferably in a therapeutically effective amount, in combination with an inhibitor/antagonist of TNF/TNFR, preferably in a therapeutically effective amount.

[0964] The compositions may comprise a pharmaceutically acceptable carrier. In general, as used herein, “pharmaceutically acceptable carrier” means all aqueous and non-aqueous solutions, sterile solutions, solvents, buffers, e.g. phosphate buffered saline (PBS) solutions, water, suspensions, emulsions, such as oil/water emulsions, various types of wetting agents, liposomes, dispersion media and coatings, which are compatible with pharmaceutical administration, in particular with parenteral administration. The use of such media and agents in pharmaceutical compositions is well known in the art, and the compositions comprising such carriers can be formulated by well-known conventional methods.

[0965] Certain embodiments provide pharmaceutical compositions comprising the antibody construct used in accordance with the invention and further one or more excipients such as those illustratively described in this section and elsewhere herein. Excipients can be used in the invention for a wide variety of purposes, such as adjusting physical, chemical, or biological properties of formulations, such as adjustment of viscosity, and or processes to improve effectiveness and/or to stabilize such formulations and processes against degradation and spoilage e.g. due to stresses that occur during manufacturing, shipping, storage, pre-use preparation, administration, and thereafter. Excipients should in general be used in their lowest effective concentrations.

[0966] In certain embodiments, the pharmaceutical composition may contain formulation materials for modifying, maintaining or preserving certain characteristics of the composition such as the pH, osmolarity, viscosity, clarity, color, isotonicity, odor, sterility, stability, rate of dissolution or release, adsorption or penetration (see, Remington's Pharmaceutical Sciences, 18″ Edition, 1990, Mack Publishing Company). In such embodiments, suitable formulation materials may include, but are not limited to:
[0967] amino acids
[0968] antimicrobials such as antibacterial and antifungal agents
[0969] antioxidants
[0970] buffers, buffer systems and buffering agents that are used to maintain the composition at physiological pH or at a slightly lower pH, typically within a pH range of from about 5 to about 8 or 9
[0971] non-aqueous solvents, vegetable oils, and injectable organic esters
[0972] aqueous carriers including water, alcoholic/aqueous solutions, emulsions or suspensions, including saline and buffered media
[0973] biodegradable polymers such as polyesters
[0974] bulking agents
[0975] chelating agents
[0976] isotonic and absorption delaying agents
[0977] complexing agents
[0978] fillers
[0979] carbohydrates
[0980] (low molecular weight) proteins, polypeptides or proteinaceous carriers, preferably of human origin
[0981] coloring and flavouring agents
[0982] sulfur containing reducing agents
[0983] diluting agents
[0984] emulsifying agents
[0985] hydrophilic polymers
[0986] salt-forming counter-ions
[0987] preservatives
[0988] metal complexes
[0989] solvents and co-solvents
[0990] sugars and sugar alcohols
[0991] suspending agents
[0992] surfactants or wetting agents
[0993] stability enhancing agents
[0994] tonicity enhancing agents
[0995] parenteral delivery vehicles
[0996] intravenous delivery vehicles

[0997] It is common knowledge that the different constituents of the pharmaceutical composition can have different effects, for example, and amino acid can act as a buffer, a stabilizer and/or an antioxidant; mannitol can act as a bulking agent and/or a tonicity enhancing agent; sodium chloride can act as delivery vehicle and/or tonicity enhancing agent; etc

[0998] In the context of the present invention, a pharmaceutical composition may comprise:
[0999] (a) an antibody construct as described herein,
[1000] (b) at least one buffer agent,
[1001] (c) at least one saccharide, and
[1002] (d) at least one surfactant;
   wherein the pH of the pharmaceutical composition is in the range of 3.5 to 6.0.

[1003] In the composition described above, the first domain preferably has an isoelectric point (pI) in the range of 4 to 9.5; the second domain has a pI in the range of 8 to 10, preferably 8.5 to 9.0; and the antibody construct optionally also comprises a third domain comprising two polypeptide monomers, each comprising a hinge, a CH2 domain and a CH3 domain, wherein said two polypeptide monomers are fused to each other via a peptide linker;

[1004] In the composition described above, it is further envisaged that the at least one buffer agent is present at a concentration range of 5 to 200 mM, more preferably at a concentration range of 10 to 50 mM. It is also envisaged that the at least one saccharide is selected from the group consisting of monosaccharide, disaccharide, cyclic polysaccharide, sugar alcohol, linear branched dextran or linear non-branched dextran. It is also envisaged that the disacchade is selected from the group consisting of sucrose, trehalose and mannitol, sorbitol, and combinations thereof. It is further envisaged that the sugar alcohol is sorbitol. It is also envisaged that the at least one saccharide is present at a concentration in the range of 1 to 15% (mN), preferably in a concentration range of 9 to 12% (mN). It is further envisaged that the antibody construct is present in a concentration range of 0.1 to 8 mg/ml, preferably of 0.2-2.5 mg/ml, more preferably of 0.25-1.0 mg/ml.

[1005] According to one embodiment of the composition described above, the at least one surfactant is selected from the group consisting of polysorbate 20, polysorbate 40, polysorbate 60, polysorbate 80, poloxamer 188, pluronic F68, triton X-100, polyoxyethylen, PEG 3350, PEG 4000 and combinations thereof. It is further envisaged that the at least one surfactant is present at a concentration in the range of 0.004 to 0.5% (mN), preferably in the range of 0.001 to 0.01% (mN). It is envisaged that the pH of the composition is in the range of 4.0 to 5.0, preferably 4.2. It is also envisaged that the pharmaceutical composition has an osmolarity in the range of 150 to 500 mOsm. It is further envisaged that the pharmaceutical composition further comprises an excipient selected from the group consisting of one or more polyol(s) and one or more amino acid(s). It is envisaged in the context of the present invention that said one or more excipient is present in the concentration range of 0.1 to 15% (w/V).

[1006] The present invention also provides a pharmaceutical composition comprising
[1007] (a) the antibody construct as described herein, preferably in a concentration range of 0.1 to 8 mg/ml, preferably of 0.2-2.5 mg/ml, more preferably of 0.25-1.0 mg/ml;
[1008] (b) 10 mM glutamate or acetate;
[1009] (c) 9% (mN) sucrose or 6% (mN) sucrose and 6% (mN) hydroxypropyl-β-cyclodextrin;
[1010] (d) 0.01% (m/V) polysorbate 80;
[1011] (e) wherein the pH of the liquid pharmaceutical composition is 4.2.

[1012] It is envisaged that the composition of the invention might comprise, in addition to the antibody construct and the inhibitor or antagonist of TNF/TNFR-mediated signaling used in accordance with the invention defined herein, further biologically active agents, depending on the intended use of the composition. Such agents might be drugs acting on the gastro-intestinal system, drugs acting as cytostatica, drugs preventing hyperurikemia, drugs inhibiting immunoreactions, drugs modulating the inflammatory response, drugs acting on the circulatory system and/or agents such as cytokines known in the art. It is also envisaged that the antibody construct used in accordance with the present invention is applied in a co-therapy, i.e., in combination with another anti-cancer medicament.

[1013] In this context, it is envisaged that the pharmaceutical composition of the invention (which comprises an antibody construct comprising a first domain which binds to the target antigen(s) on the surface of a target cell and a second domain which binds to CD3 on the surface of a T cell, and an inhibitor/antagonist of TNF/TNFR signaling, as described in more detail herein above) furthermore comprises an agent, preferably an antibody or antibody construct, which binds to a protein of the immune checkpoint pathway (such as PD-1 or CTLA-4) or to a co-stimulatory immune checkpoint receptor (such as 4-1BB). The present invention also refers to a combination of an antibody construct according used in accordance with the invention (which comprises an antibody construct comprising a first domain which binds to the target antigen(s) on the surface of a target cell and a second domain which binds to CD3 on the surface of a T cell, and an inhibitor/antagonist of TNF/TNFR signaling, as described in more detail herein above) and an agent, preferably an antibody or antibody construct, which binds to a protein of the immune checkpoint pathway (such as PD-1 or CTLA-4) or to a co-stimulatory immune checkpoint receptor (such as 4-1BB). Due to the nature of the at least three ingredients of the combination, namely their pharmaceutical activity, the combination can also be referred to as a therapeutic combination. In some embodiments, the combination can be in the form of a pharmaceutical composition or of a kit. According to one embodiment, the pharmaceutical composition or the combination comprises an antibody construct used in accordance with the invention, an inhibitor/antagonist of TNF/TNFR signaling, and an antibody or antibody construct which binds to PD-1. Anti-PD-1 binding proteins useful for this purpose are e.g. described in detail in PCT/US2019/013205.

[1014] Hence, in a further aspect, the present invention is directed to a pharmaceutical composition or to a combination comprising:

(i) an antibody construct comprising a first domain which binds to the target antigen(s) on the surface of a target cell and a second domain which binds to CD3 on the surface of a T cell and at least one inhibitor/antagonist of TNF/TNFR, as described in more detail herein above, and
(ii) an antibody or antibody construct which binds to PD-1 and comprises: a VH region comprising CDR-H1 as depicted in SEQ ID NO: 122, CDR-H2 as depicted in SEQ ID NO: 123, and CDR-H3 as depicted in SEQ ID NO: 124, and/or a VL region comprising CDR-L1 as depicted in SEQ ID NO: 125, CDR-L2 as depicted in SEQ ID NO: 126 and CDR-L3 as depicted in SEQ ID NO: 127; a VH region comprising CDR-H1 as depicted in SEQ ID NO: 128, CDR-H2 as depicted in SEQ ID NO: 129, and CDR-H3 as depicted in SEQ ID NO: 130, and/or a VL region comprising CDR-L1 as depicted in SEQ ID NO: 131, CDR-L2 as depicted in SEQ ID NO: 132 and CDR-L3 as depicted in SEQ ID NO: 133; a VH region comprising CDR-H1 as depicted in SEQ ID NO: 134, CDR-H2 as depicted in SEQ ID NO: 135, and CDR-H3 as depicted in SEQ ID NO: 136, and/or a VL region comprising CDR-L1 as depicted in SEQ ID NO: 137, CDR-L2 as depicted in SEQ ID NO: 138 and CDR-L3 as depicted in SEQ ID NO: 139; a VH region comprising CDR-H1 as depicted in SEQ ID NO: 140, CDR-H2 as depicted in SEQ ID NO: 141, and CDR-H3 as depicted in SEQ ID NO: 142, and/or a VL region comprising CDR-L1 as depicted in SEQ ID NO: 143, CDR-L2 as depicted in SEQ ID NO: 144 and CDR-L3 as depicted in SEQ ID NO: 145; a VH region comprising CDR-H1 as depicted in SEQ ID NO: 146, CDR-H2 as depicted in SEQ ID NO: 147, and CDR-H3 as depicted in SEQ ID NO: 148, and/or a VL region comprising CDR-L1 as depicted in SEQ ID NO: 149, CDR-L2 as depicted in SEQ ID NO: 150 and CDR-L3 as depicted in SEQ ID NO: 151; a VH region comprising CDR-H1 as depicted in SEQ ID NO: 152, CDR-H2 as depicted in SEQ ID NO: 153, and CDR-H3 as depicted in SEQ ID NO: 154, and/or a VL region comprising CDR-L1 as depicted in SEQ ID NO: 155, CDR-L2 as depicted in SEQ ID NO: 156 and CDR-L3 as depicted in SEQ ID NO: 157; a VH region comprising CDR-H1 as depicted in SEQ ID NO: 158, CDR-H2 as depicted in SEQ ID NO: 159, and CDR-H3 as depicted in SEQ ID NO: 160, and/or a VL region comprising CDR-L1 as depicted in SEQ ID NO: 161, CDR-L2 as depicted in SEQ ID NO: 162 and CDR-L3 as depicted in SEQ ID NO: 163; or a VH region comprising CDR-H1 as depicted in SEQ ID NO: 164, CDR-H2 as depicted in SEQ ID NO: 165, and CDR-H3 as depicted in SEQ ID NO: 166, and/or a VL region comprising CDR-L1 as depicted in SEQ ID NO: 167, CDR-L2 as depicted in SEQ ID NO: 168 and CDR-L3 as depicted in SEQ ID NO: 169.
(iii) In one embodiment, the above described antibody or antibody construct which binds to PD-1 comprises a VH region as depicted in SEQ ID NO: 170, and a VL region as depicted in SEQ ID NO: 171; a VH region as depicted in SEQ ID NO: 172, and a VL region as depicted in SEQ ID NO: 173; a VH region as depicted in SEQ ID NO: 174, and a VL region as depicted in SEQ ID NO: 175; a VH region as depicted in SEQ ID NO: 176, and a VL region as depicted in SEQ ID NO: 177; a VH region as depicted in SEQ ID NO: 178, and a VL region as depicted in SEQ ID NO: 179; a VH region as depicted in SEQ ID NO: 180, and a VL region as depicted in SEQ ID NO: 181; a VH region as depicted in SEQ ID NO: 182, and a VL region as depicted in SEQ ID NO: 183; or a VH region as depicted in SEQ ID NO: 184, and a VL region as depicted in SEQ ID NO: 185.
(iv) In one embodiment, the above antibody or antibody construct which binds to PD-1 comprises: a heavy chain as depicted in SEQ ID NO: 186, and a light chain as depicted in SEQ ID NO: 187; a heavy chain as depicted in SEQ ID NO: 188, and a light chain as depicted in SEQ ID NO: 189; a heavy chain as depicted in SEQ ID NO: 190, and a light chain as depicted in SEQ ID NO: 191; a heavy chain as depicted in SEQ ID NO: 192, and a light chain as depicted in SEQ ID NO: 193; a heavy chain as depicted in SEQ ID NO: 194, and a light chain as depicted in SEQ ID NO: 195; a heavy chain as depicted in SEQ ID NO: 196, and a light chain as depicted in SEQ ID NO: 197; a heavy chain as depicted in SEQ ID NO: 198, and a light chain as depicted in SEQ ID NO: 199; or a heavy chain as depicted in SEQ ID NO: 200, and a light chain as depicted in SEQ ID NO: 201.

[1015] In certain embodiments, the optimal pharmaceutical composition is determined depending upon, for example, the intended route of administration, delivery format and desired dosage. See, for example, Remington's Pharmaceutical Sciences, supra. In certain embodiments, such compositions may influence the physical state, stability, rate of in vivo release and rate of in vivo clearance of the antibody construct used in accordance with the invention. In certain embodiments, the primary vehicle or carrier in a pharmaceutical composition may be either aqueous or non-aqueous in nature. For example, a suitable vehicle or carrier may be water for injection or physiological saline solution, possibly supplemented with other materials common in compositions for parenteral administration. In certain embodiments, the compositions comprising the antibody construct used in accordance with the invention may be prepared for storage by mixing the selected composition having the desired degree of purity with optional formulation agents (Remington's Pharmaceutical Sciences, supra) in the form of a lyophilized cake or an aqueous solution. Further, in certain embodiments, the antibody construct used in accordance with the invention may be formulated as a lyophilizate using appropriate excipients.

[1016] When parenteral administration is contemplated, the therapeutic compositions used in this invention may be provided in the form of a pyrogen-free, parenterally acceptable aqueous solution comprising the desired antibody construct used in accordance with the invention in a pharmaceutically acceptable vehicle. A particularly suitable vehicle for parenteral injection is sterile distilled water in which the antibody construct used in accordance with the invention is formulated as a sterile, isotonic solution, properly preserved. In certain embodiments, the preparation can involve the formulation of the desired molecule with an agent that may provide controlled or sustained release of the product which can be delivered via depot injection, or that may promote sustained duration in the circulation. In certain embodiments, implantable drug delivery devices may be used to introduce the desired antibody construct.

[1017] Additional pharmaceutical compositions will be evident to those skilled in the art, including formulations including the antibody construct used in accordance with the invention in sustained or controlled delivery formulations. Techniques for formulating a variety of sustained- or controlled-delivery means are known to those skilled in the art. The antibody construct may also be entrapped in microcapsules prepared, for example, by coacervation techniques or by interfacial polymerization, in colloidal drug delivery systems, or in macroemulsions. Such techniques are disclosed in Remington's Pharmaceutical Sciences, supra.

[1018] Pharmaceutical compositions used for in vivo administration are typically provided as sterile preparations. Sterilization can be accomplished by filtration through sterile filtration membranes. When the composition is lyophilized, sterilization using this method may be conducted either prior to or following lyophilization and reconstitution. Compositions for parenteral administration can be stored in lyophilized form or in a solution. Parenteral compositions are generally placed into a container having a sterile access port, for example, an intravenous solution bag or vial having a stopper pierceable by a hypodermic injection needle.

[1019] Another aspect of the invention includes self-buffering formulations comprising the antibody construct used in accordance with the invention, which can be used as pharmaceutical compositions, as described in international patent application WO 2006/138181. A variety of publications are available on protein stabilization and formulation materials and methods useful in this regard, such as Arawaka T. et al., Pharm Res. 1991 March; 8(3):285-91; Kendrick et al., “Physical stabilization of proteins in aqueous solution” in: Rational Design of Stable Protein Formulations: Theory and Practice, Carpenter and Manning, eds. Pharmaceutical Biotechnology. 13: 61-84 (2002), and Randolph and Jones, Pharm Biotechnol. 2002; 13:159-75, see particularly the parts pertinent to excipients and processes for self-buffering protein formulations, especially as to protein pharmaceutical products and processes for veterinary and/or human medical uses.

[1020] Salts may be used in accordance with certain embodiments of the invention, e.g. to adjust the ionic strength and/or the isotonicity of a composition or formulation and/or to improve the solubility and/or physical stability of an antibody construct or other ingredient of a composition in accordance with the invention. Ions can stabilize the native state of proteins by binding to charged residues on the protein's surface and by shielding charged and polar groups in the protein and reducing the strength of their electrostatic interactions, attractive, and repulsive interactions. Ions also can stabilize the denatured state of a protein by binding to, particularly the denatured peptide linkages (—CONH) of the protein. Furthermore, ionic interaction with charged and polar groups in a protein also can reduce intermolecular electrostatic interactions and, thereby, prevent or reduce protein aggregation and insolubility.

[1021] Ionic species differ significantly in their effects on proteins. Several categorical rankings of ions and their effects on proteins have been developed that can be used in formulating pharmaceutical compositions in accordance with the invention. One example is the Hofmeister series, which ranks ionic and polar non-ionic solutes by their effect on the conformational stability of proteins in solution. Stabilizing solutes are referred to as “kosmotropic”. Destabilizing solutes are referred to as “chaotropic”. Kosmotropes are commonly used at high concentrations to precipitate proteins from solution (“salting-out”). Chaotropes are commonly used to denature and/or to solubilize proteins (“salting-in”). The relative effectiveness of ions to “salt-in” and “salt-out” defines their position in the Hofmeister series.

[1022] Free amino acids can be used in formulations or compositions comprising the antibody construct used in accordance with the invention in accordance with various embodiments of the invention as bulking agents, stabilizers, and antioxidants, as well as for other standard uses. Certain amino acids can be used for stabilizing proteins in a formulation, others are useful during lyophilization to ensure correct cake structure and properties of the active ingredient. Some amino acids may be useful to inhibit protein aggregation in both liquid and lyophilized formulations, and others are useful as antioxidants.

[1023] Polyols are kosmotropic and are useful as stabilizing agents in both liquid and lyophilized formulations to protect proteins from physical and chemical degradation processes. Polyols are also useful for adjusting the tonicity of formulations and for protecting against freeze-thaw stresses during transport or the preparation of bulks during the manufacturing process. Polyols can also serve as cryoprotectants in the context of the present invention.

[1024] Certain embodiments of the formulation or composition comprising the antibody construct used in accordance with the invention can comprise surfactants. Proteins may be susceptible to adsorption on surfaces and to denaturation and resulting aggregation at air-liquid, solid-liquid, and liquid-liquid interfaces. These deleterious interactions generally scale inversely with protein concentration and are typically exacerbated by physical agitation, such as that generated during the shipping and handling of a product. Surfactants are routinely used to prevent, minimize, or reduce surface adsorption. Surfactants also are commonly used to control protein conformational stability. The use of surfactants in this regard is protein specific, since one specific surfactant will typically stabilize some proteins and destabilize others.

[1025] Certain embodiments of the formulation or composition comprising the antibody construct used in accordance with the invention can comprise one or more antioxidants. To some extent deleterious oxidation of proteins can be prevented in pharmaceutical formulations by maintaining proper levels of ambient oxygen and temperature and by avoiding exposure to light. Antioxidant excipients can also be used to prevent oxidative degradation of proteins. It is envisaged that antioxidants used in therapeutic protein formulations in accordance with the present invention can be water-soluble and maintain their activity throughout the shelf life of the product (the composition comprising the antibody construct). Antioxidants can also damage proteins and should hence—among other things—be selected in a way to eliminate or sufficiently reduce the possibility of antioxidants damaging the antibody construct or other proteins in the formulation.

[1026] Certain embodiments of the formulation or composition comprising the antibody construct used in accordance with the invention can comprise one or more preservatives. Preservatives are necessary for example when developing multi-dose parenteral formulations that involve more than one extraction from the same container. Their primary function is to inhibit microbial growth and ensure product sterility throughout the shelf-life or term of use of the drug product. Although preservatives have a long history of use with small-molecule parenterals, the development of protein formulations that include preservatives can be challenging. Preservatives very often have a destabilizing effect (aggregation) on proteins, and this has become a major factor in limiting their use in multi-dose protein formulations. To date, most protein drugs have been formulated for single-use only. However, when multi-dose formulations are possible, they have the added advantage of enabling patient convenience, and increased marketability. A good example is that of human growth hormone (hGH) where the development of preserved formulations has led to commercialization of more convenient, multi-use injection pen presentations. Several aspects need to be considered during the formulation and development of preserved dosage forms. The effective preservative concentration in the drug product must be optimized. This requires testing a given preservative in the dosage form with concentration ranges that confer anti-microbial effectiveness without compromising protein stability.

[1027] As might be expected, development of liquid formulations containing preservatives are more challenging than lyophilized formulations. Freeze-dried products can be lyophilized without the preservative and reconstituted with a preservative containing diluent at the time of use. This shortens the time during which a preservative is in contact with the antibody construct, significantly minimizing the associated stability risks. With liquid formulations, preservative effectiveness and stability should be maintained over the entire product shelf-life. An important point to note is that preservative effectiveness should be demonstrated in the final formulation containing the active drug and all excipient components. Once the pharmaceutical composition has been formulated, it may be stored in sterile vials as a solution, suspension, gel, emulsion, solid, crystal, or as a dehydrated or lyophilized powder. Such formulations may be stored either in a ready-to-use form or in a form (e.g., lyophilized) that is reconstituted prior to administration.

[1028] The biological activity of the pharmaceutical composition defined herein can be determined for instance by cytotoxicity assays, as described in the following examples, in WO 99/54440 or by Schlereth et al. (Cancer Immunol. Immunother. 20 (2005), 1-12). “Efficacy” or “in vivo efficacy” as used herein refers to the response to therapy by the pharmaceutical composition of formulation of the invention, using e.g. standardized NCI response criteria. The success or in vivo efficacy of the therapy using a pharmaceutical composition of the invention refers to the effectiveness of the composition for its intended purpose, i.e. the ability of the composition to cause its desired effect, i.e. depletion of pathologic cells, e.g. tumor cells. The in vivo efficacy may be monitored by established standard methods for the respective disease entities including, but not limited to, white blood cell counts, differentials, fluorescence activated cell sorting, bone marrow aspiration. In addition, various disease specific clinical chemistry parameters and other established standard methods may be used. Furthermore, computer-aided tomography, X-ray, nuclear magnetic resonance tomography, positron-emission tomography scanning, lymph node biopsies/histologies and other established standard methods may be used.

[1029] Another major challenge in the development of drugs such as the pharmaceutical composition of the invention is the predictable modulation of pharmacokinetic properties. To this end, a pharmacokinetic profile of the drug candidate, i.e. a profile of the pharmacokinetic parameters that affect the ability of a specific drug to treat a given condition, can be established. Pharmacokinetic parameters of the drug influencing the ability of a drug for treating a certain disease entity include, but are not limited to: half-life, volume of distribution, hepatic first-pass metabolism and the degree of blood serum binding. The efficacy of a given drug agent can be influenced by each of the parameters mentioned above.

[1030] “Half-life” is the time required for a quantity to reduce to half its initial value. The medical sciences refer to the half-life of substances or drugs in the human body. In a medical context, half-life may refer to the time it takes for a substance/drug to lose one-half of its activity, e.g. pharmacologic, physiologic, or radiological activity. The half-life may also describe the time that it takes for the concentration of a drug or substance (e.g., an antibody construct used in accordance with the invention) in blood plasma/serum to reach one-half of its steady-state value (“serum half-life”). Typically, the elimination or removal of an administered substance/drug refers to the body's cleansing through biological processes such as metabolism, excretion, also involving the function of kidneys and liver. The “first-pass metabolism” is a phenomenon of drug metabolism whereby the concentration of a drug is reduced before it reaches the circulation. It is the fraction of drug lost during the process of absorption. Accordingly, by “hepatic first-pass metabolism” is meant the propensity of a drug to be metabolized upon first contact with the liver, i.e. during its first pass through the liver. “Volume of distribution” (VD) means the degree to which a drug is distributed in body tissue rather than the blood plasma, a higher VD indicating a greater amount of tissue distribution. The retention of a drug can occur throughout the various compartments of the body, such as intracellular and extracellular spaces, tissues and organs, etc. “Degree of blood serum binding” means the propensity of a drug to interact with and bind to blood serum proteins, such as albumin, leading to a reduction or loss of biological activity of the drug.

[1031] Pharmacokinetic parameters also include bioavailability, lag time (T lag), Tmax, absorption rates, and/or Cmax for a given amount of drug administered. “Bioavailability” refers to the fraction of an administered dose of a drug/substance that reaches the systemic circulation (the blood compartment). When a medication is administered intravenously, its bioavailability is considered to be 100%. However, when a medication is administered via other routes (such as orally), its bioavailability generally decreases. “Lag time” means the time delay between the administration of the drug and its detection and measurability in blood or plasma. Cmax is the maximum plasma concentration that a drug achieves after its administration (and before the administration of a second dose). Tmax is the time at which Cmax is reached. The time to reach a blood or tissue concentration of the drug which is required for its biological effect is influenced by all parameters. Pharmacokinetic parameters of antibody constructs exhibiting cross-species specificity may be determined in preclinical animal testing in non-chimpanzee primates as outlined above and set forth e.g. in Schlereth et al. (supra).

[1032] One embodiment provides the antibody construct used in accordance with the invention (or the antibody construct produced according to the process disclosed herein) used in the prevention, treatment or amelioration of a disease, preferably a neoplasm. Another embodiment provides the use of the antibody construct used in accordance with the invention in the manufacture of a medicament for the prevention, treatment or amelioration of a disease, preferably a neoplasm. It is also envisaged to provide a method for the prevention, treatment or amelioration of a disease, preferably a neoplasm, comprising the step of administering to a subject in need thereof the antibody construct. The terms “subject in need”, “patient” or those “in need of treatment” include those already with the disease, as well as those in which the disease is to be prevented. The terms also include human and other mammalian subjects that receive either prophylactic or therapeutic treatment unless the species or genus is specifically indicated. In particular embodiments of all other embodiments or claims herein, the term “patient” relates to human patients and/or non-human primates.

[1033] The antibody constructs used in accordance with the invention and the formulations/pharmaceutical compositions described herein are useful in the treatment, amelioration and/or prevention of the medical condition as described herein in a patient in need thereof. The term “treatment” refers to both therapeutic treatment and prophylactic or preventative measures. Treatment includes the application or administration of the antibody constructs/pharmaceutical composition to the body, to an isolated tissue, or to a cell from a patient or a subject in need who has a disease/disorder as described herein, a symptom of such disease/disorder, or a predisposition toward such disease/disorder, with the purpose to cure, heal, alleviate, relieve, alter, remedy, ameliorate, improve, or affect the disease, the symptom of the disease, or the predisposition toward the disease. The term “amelioration” as used herein refers to any improvement of the disease state of a patient, by the administration of an antibody construct according to the invention to such patient or subject in need thereof. Such an improvement may be a slowing down or stopping of the progression of the disease of the patient, and/or as a decrease in severity of disease symptoms, an increase in frequency or duration of disease symptom-free periods or a prevention of impairment or disability due to the disease. The term “prevention” as used herein means the avoidance of the occurrence or of the re-occurrence of a disease as specified herein, by the administration of an antibody construct used in accordance with the invention to a subject in need thereof. Further, a “patient at risk of developing an adverse event” or “patient with an intolerance to” a given substance/drug includes patients that are known to have previously reacted adversely to such given substance/drug. Also encompassed can be patients having a total B cell count of less than about 50 B cells/microliter of peripheral blood, which are known as susceptible to potential adverse effects also including the onset of an adverse effect to immunotherapy with CD3-binding antibody-based molecules, particularly with blinatumumab, while a patient who has a total B cell count of greater than about 50 B cells/microliter of peripheral blood does not have (is not at) or at least has (is at) a decreased risk of potential adverse effects. Also patients with a B:T cell ratio that is lower than 1:5 to 1:10, particularly lower than 1:5 are often at higher risk of developing adverse events to immunotherapy with CD3-binding antibody-based molecules. Such patients form are particular group that profits from the herein described methods of preventing adverse effects and is a particular group that is contemplated for a preventive method using the herein described TNF/TNFR signaling antagonists or inhibitors. To determine the B cell numbers or the B:T ratio, A sample which includes peripheral blood mononuclear cells (PBMCs), in particular B cells and T cells is preferably taken from peripheral blood of a patient. The B:T cell ratio of the patient population treated according to the present disclosure may be about 1:5 or lower including a B:T cell ratio of about 1:6, 1:7, 1:8, 1:9, 1:10, 1:11, 1:12, 1:13, 1:14, 1:15, 1:20, 1:100, 1:200, 1:400, 1:500, 1:1000, 1:2000, 1:3000, 1:4000, 1:5000 or even lower, with less than about 1:8, 1:9, 1:10, 1:50, 1:100, 1:500, 1:1000 being indicative for a risk of potential adverse effects for said patient.

[1034] “Determining the B:T cell ratio” includes determining the total B cell number in a sample from a patient, preferably in a peripheral blood sample of the patient; determining the total T cell number in sample from a patient, preferably in a peripheral blood sample of the patient; and calculating the ratio of the B cell number of step (a) and the T cell number of step (b) in order to obtain a B:T cell ratio. Of note, a low B:T cell ratio can also be seen as high T:B ratio; and vice versa. Accordingly, the ratios provided herein for a low B:T cell ratio would then have to be reversed.

[1035] The term “disease” refers to any condition that would benefit from treatment with the antibody construct or the pharmaceutical composition described herein. This includes chronic and acute disorders or diseases including those pathological conditions that predispose the mammal to the disease in question. The disease is preferably a neoplasm, cancer or tumor. The disease, neoplasm, cancer or tumor is preferably the target antigen(s) positive, i.e. it is characterized by expression or overexpression of the target antigen(s).

[1036] A “neoplasm” is an abnormal growth of tissue, usually but not always forming a mass. When also forming a mass, it is commonly referred to as a “tumor”. Neoplasms or tumors can be benign, potentially malignant (pre-cancerous), or malignant (cancerous). Malignant neoplasms/tumors are commonly called cancer. They usually invade and destroy the surrounding tissue and may form metastases, i.e., they spread to other parts, tissues or organs of the body. A “primary tumor” is a tumor growing at the anatomical site where tumor progression began and proceeded to yield a cancerous mass. Most cancers develop at their primary site but then go on to metastasize or spread to other parts (e.g. tissues and organs) of the body. These further tumors are “secondary tumors”. Most cancers continue to be called after their primary site, even after they have spread to other parts of the body.

[1037] The term “target cell” as used herein relates to cells expressing a target antigen, e.g. a tumor associated antigen, hence the target cells may also be referred to as cancer cells, independent of their stage of transformation or cancer stage, provided the cells express or are induced to express a target antigen that is selectively bound by a domain of the herein described antibody construct and which is different from CD3.

[1038] Lymphomas and leukemias are lymphoid neoplasms. For the purposes of the present invention, they are also encompassed by the terms “tumor” or “cancer”. For the purposes of the present invention, the terms “neoplasm”, “tumor” and “cancer” may be used interchangeably, and they comprise both primary tumors/cancers and secondary tumors/cancers (or “metastases”) as well as mass-forming neoplasms (tumors) and lymphoid neoplasms (such as lymphomas and leukemias), and minimal residual disease (MRD).

[1039] The term “minimal residual disease” (MRD) refers to the evidence for the presence of small numbers of residual cancer cells that remain in the patient after cancer treatment, e.g. when the patient is in remission (no symptoms or signs of disease). A very small number of remaining cancer cells usually cannot be detected by routine means because the standard tests used to assess or detect cancer are not sensitive enough to detect MRD. Nowadays, very sensitive molecular biology tests for MRD are available, such as flow cytometry, PCR and next-generation sequencing. These tests can measure minimal levels of cancer cells in tissue samples, sometimes as low as one cancer cell in a million normal cells. In the context of the present invention, the terms “prevention”, “treatment” or “amelioration” of a cancer are envisaged to also encompass “prevention, treatment or amelioration of MRD”, whether the MRD was detected or not.

[1040] In one embodiment of the invention, the neoplasm, cancer or tumor is selected from the group comprising: carcinoma, sarcoma, myeloma, leukemia, or lymphoma, including, but not limited to, (or consisting of) ovarian cancer, uterine cancer, germinal cancer, breast cancer, brain cancer, prostate cancer, pancreas cancer, liver cancer, colon cancer, intestinal cancer, bone cancer, mouth, gastric cancer, bone cancer, mouth cancer, esophagus cancer, leukemia, melanoma, renal carcinoma, bladder carcinoma, small cell carcinoma, head and neck cancer, and lung cancer.

[1041] The antibody construct used in accordance with the invention will generally be designed for specific routes and methods of administration, for specific dosages and frequencies of administration, for specific treatments of specific diseases, with ranges of bio-availability and persistence, among other things. The materials of the composition are preferably formulated in concentrations that are acceptable for the site of administration. Formulations and compositions thus may be designed in accordance with the invention for delivery by any suitable route of administration. In the context of the present invention, the routes of administration include, but are not limited to topical routes, enteral routes and parenteral routes. The herein described antibody constructs are particularly suitable for intravenous administration. The TNF/TNFR and/or IL6/IL6R signaling pathway inhibitors are particularly for intravenous and/or subcutaneous administration as commonly known in the art.

[1042] If the pharmaceutical composition has been lyophilized, the lyophilized material is first reconstituted in an appropriate liquid prior to administration. The lyophilized material may be reconstituted in, e.g., bacteriostatic water for injection (BWFI), physiological saline, phosphate buffered saline (PBS), or the same formulation the protein had been in prior to lyophilization. The pharmaceutical compositions and the antibody construct used in accordance with this invention are particularly useful for parenteral administration, e.g., intravenous delivery, for example by injection or infusion. Pharmaceutical compositions may be administered using a medical device. Examples of medical devices for administering pharmaceutical compositions are described in U.S. Pat. Nos. 4,475,196; 4,439,196; 4,447,224; 4,447, 233; 4,486,194; 4,487,603; 4,596,556; 4,790,824; 4,941,880; 5,064,413; 5,312,335; 5,312,335; 5,383,851; and 5,399,163.

[1043] The compositions of the present invention can be administered to the subject at a suitable dose which can be determined e.g. in dose escalating studies. As set forth above, the antibody construct used in accordance with the invention exhibiting cross-species specificity as described herein can also be advantageously used in in preclinical testing in non-chimpanzee primates. The dosage regimen will be determined by the attending physician and clinical factors. As is well known in the medical art, dosages for any one patient depend upon many factors, including the patient's size, body surface area, age, the specific compound to be administered, sex, time and route of administration, general health, and other drugs being administered concurrently.

[1044] An “effective dose” is an amount of a therapeutic agent that is sufficient to achieve or at least partially achieve a desired effect. A “therapeutically effective dose” is an amount that is sufficient to cure or at least partially arrest the disease and its complications, signs and symptoms in a patient suffering from the disease. Amounts or doses effective for this use will depend on the disease to be treated (the indication), the delivered antibody construct, the therapeutic context and objectives, the severity of the disease, prior therapy, the patient's clinical history and response to the therapeutic agent, the route of administration, the size (body weight, body surface) and/or condition (the age and general health) of the patient, and the general state of the patient's own immune system. The proper dose can be adjusted according to the judgment of the attending physician, to obtain the optimal therapeutic effect.

[1045] A therapeutically effective amount of an antibody construct used in accordance with the invention preferably results in a decrease in severity of disease symptoms, an increase in frequency or duration of disease symptom-free periods or a prevention of impairment or disability due to the disease. In the treatment of the target antigen(s)-expressing tumors, a therapeutically effective amount of the antibody construct of the invention preferably inhibits tumor cell growth by at least about 20%, at least about 40%, at least about 50%, at least about 60%, at least about 70%, at least about 80%, or at least about 90% relative to untreated patients. The ability of a compound to inhibit tumor growth may also be evaluated in an animal model predictive of efficacy in human tumors.

[1046] In a further embodiment, the invention provides a kit comprising an antibody construct used in accordance with the invention, an antibody construct produced according to the process disclosed herein, a polynucleotide disclosed herein, a vector disclosed herein, and/or a host cell disclosed herein. In the context of the present invention, the term “kit” means two or more components—one of which corresponding to the antibody construct, the pharmaceutical composition, the polynucleotide, the vector or the host cell of the invention—packaged together in a container, recipient or otherwise. A kit can hence be described as a set of products and/or utensils that are sufficient to achieve a certain goal, which can be marketed as a single unit. In a preferred embodiment of the present invention, the kit comprises an antibody construct as defined above as well as an inhibitor/antagonist of TNFa/TNFaR-signaling (for example, etanercept).

[1047] It is envisaged that a further component of the kit of the invention is an agent, preferably an antibody or antibody construct, which binds to a protein of the immune checkpoint pathway (such as PD-1 or CTLA-4) or to a co-stimulatory immune checkpoint receptor (such as 4-1BB). These agents are described in more detail herein above. According to one embodiment, the kit comprises an antibody construct as defined herein, an inhibitor/antagonist of TNFa/TNFaR-signaling (for example, etanercept), and an antibody or antibody construct which binds to PD-1. Anti-PD-1 binding proteins useful for this purpose are e.g. described in detail in PCT/US2019/013205. In certain embodiment, the kit allows for the simultaneous and/or sequential administration of the components.

[1048] The kit may comprise one or more recipients (such as vials, ampoules, containers, syringes, bottles, bags) of any appropriate shape, size and material (preferably waterproof, e.g. plastic or glass) containing the antibody construct or the pharmaceutical composition of the present invention in an appropriate dosage for administration (see above). The kit may additionally contain directions used (e.g. in the form of a leaflet or instruction manual), means for administering the antibody construct or the pharmaceutical composition of the present invention such as a syringe, pump, infuser or the like, means for reconstituting the antibody construct as defined above, the inhibitor/antagonist of TNFa/TNFaR-signaling (for example, etanercept) and/or means for diluting the antibody construct used in accordance with the invention.

[1049] The invention also provides kits for a single-dose administration unit. The kit of the invention may also contain a first recipient comprising a dried/lyophilized antibody construct or pharmaceutical composition, a second recipient comprising an inhibitor/antagonist of TNFa/TNFaR-signaling (for example, etanercept) and a third recipient comprising an aqueous formulation. In certain embodiments of this invention, kits containing single-chambered and multi-chambered pre-filled syringes are provided.

[1050] As used herein, the singular forms “a”, “an”, and “the” include plural references unless the context clearly indicates otherwise. Thus, for example, reference to “a reagent” includes one or more of such different reagents and reference to “the method” includes reference to equivalent steps and methods known to those of ordinary skill in the art that could be modified or substituted for the methods described herein.

[1051] Unless otherwise indicated, the term “at least” preceding a series of elements is to be understood to refer to every element in the series. Those skilled in the art will recognize or be able to ascertain using no more than routine experimentation, many equivalents to the specific embodiments of the invention described herein. Such equivalents are intended to be encompassed by the present invention.

[1052] The term “and/or” wherever used herein includes the meaning of “and”, “or” and “all or any other combination of the elements connected by said term”.

[1053] The term “about” or “approximately” as used herein means within ±20%, preferably within ±15%, more preferably within ±10%, and most preferably within 15% of a given value or range. It also includes the concrete value, e.g., “about 50” includes the value “50”.

[1054] Throughout this specification and the claims, unless the context requires otherwise, the word “comprise”, and variations such as “comprises” and “comprising”, will be understood to imply the inclusion of a stated integer or step or group of integers or steps but not the exclusion of any other integer or step or group of integer or step. When used herein the term “comprising” can be substituted with the term “containing” or “including” or sometimes when used herein with the term “having”.

[1055] When used herein “consisting of” excludes any element, step, or ingredient not specified in the claim element. When used herein, “consisting essentially of” does not exclude materials or steps that do not materially affect the basic and novel characteristics of the claim.

[1056] In each instance herein, any of the terms “comprising”, “consisting essentially of” and “consisting of” may be replaced with either of the other two terms.

[1057] The above description and the below examples provide exemplary arrangements, but the present invention is not limited to the specific methodologies, techniques, protocols, material, reagents, substances, etc., described herein and as such can vary. The terminology used herein serves to describe specific embodiments only. The terminology used herein does not intend to limit the scope of the present invention, which is defined solely by the claims. Aspects of the invention are provided in the independent claims. Some optional features of the invention are provided in the dependent claims.

[1058] All publications and patents cited throughout the text of this specification (including all patents, patent applications, scientific publications, manufacturer's specifications, instructions, etc.), whether supra or infra, are hereby incorporated by reference in their entirety. Nothing herein is to be construed as an admission that the invention is not entitled to antedate such disclosure by virtue of prior invention. To the extent the material incorporated by reference contradicts or is inconsistent with this specification, the specification will supersede any such material.

[1059] Sequences of binders that target BCMA, Claudin 6, Claudin 18.2, and Mucin 17 are disclosed in WO2017/134134, provisional application U.S. 63/110,817, WO2020/025792, and WO2019/133961, respectively. Some of the sequences are also shown in the Sequence listing that forms part of the present disclosure.

### DESCRIPTION OF THE FIGURES

[1060] FIG. 1—Pretreatment with TNFα blockade did not affect BITE® molecule efficacy: CD3, preferably human CD3,ε knock-in mice were pretreated with either a control antibody, TNFα blockade agents (anti-TNFα antibody or a TNFRII-Fc) administered once per day for two days prior to dosing either a negative control BITE® molecule (1000 μg/kg) or a mouse CD19 BITE® molecule (100 μg/kg or 1000 μg/kg) that recognizes CD19 on B cells (n=5 animals per group). At 72 hours post-BiTE® dose, animals were euthanized, and spleens were harvested for analysis. B cells were enumerated by flow cytometry as described in Methods. The engagement of T cells in vivo using a murine CD19 targeted BiTE® molecule resulted in depletion of B cells in the spleen, and administration of TNFα blocking reagents prior to BiTE® administration did not affect the ability of the BiTE® molecule to mediate depletion of splenic B cells. Significance values: ns, p>0.05; *p≤0.05, **p≤0.01, ***p≤0.001, ****p≤0.0001 (one-way ANOVA with Tukey's test); TNFα=tumor necrosis factor alpha, BiTE®=bispecific T cell engager, anti-TNFα Ab=TNFα blocking antibody, TNFRII-Fc=tumor necrosis factor receptor II-Fc fusion protein.

[1061] FIG. 2. BiTE® molecule-induced serum IFNγ and IL-2 were not significantly reduced by TNFα blockade prior to BiTE® molecule administration: CD3, preferably human CD3,ε knock-in mice were pretreated with either a control antibody, TNFα blockade agents (anti-TNFα antibody or a TNFRII-Fc) for two days prior to dosing with either a negative control BiTE® molecule (1000 μg/kg) or a mouse CD19 BiTE® molecule (100 μg/kg and 1000 μg/kg) that recognizes CD19 on B cells (n=5 animals per group). Serum IFNγ and IL-2 were measured four hours after BiTE® treatment. Mean (A) IFNγ, (B) IL-2 levels in groups pretreated with both TNFα blocking agents were not significantly lower after administration of CD19 BiTE® at both doses compared to control antibody pretreatment groups (one-way ANOVA with Tukey's test). Significance values: ns, p>0.05; *p≤0.05, **p≤0.01, ***p≤0.001, ****p≤0.0001; IFNγ=interferon gamma, IL-2=interleukin 2, BiTE®=bispecific T cell engager, TNFα=tumor necrosis factor alpha, anti-TNFα Ab=TNFα blocking antibody, TNFRII-Fc=TNF receptor II Fe-fusion protein, ULOD=upper limit of detection.

[1062] FIG. 3. BiTE® molecule-induced Serum IL-6 was significantly reduced by TNFα blockade prior to BiTE® administration: CD3, preferably human CD3,ε knock-in mice were pretreated with either a control antibody, TNFα blockade agents (anti-TNFα antibody or a TNFRII-Fc) for two days prior to dosing with either a negative control BiTE® molecule (1000 μg/kg) or a mouse CD19 BiTE® molecule (100 μg/kg and 1000 μg/kg) that recognizes CD19 on B cells (n=5 animals per group). Serum IL-6 was measured four hours after BiTE® treatment. Mean IL-6 levels in groups pretreated with both TNFα blocking agents were significantly lower after administration of CD19 BiTE® at both doses compared to control antibody pretreatment groups (one-way ANOVA with Tukey's test). Significance values: ns, p>0.05; *p≤0.05, **p≤0.01, ***p≤0.001, ****p≤0.0001; IL-6=interleukin 6, BiTE®=bispecific T cell engager, TNFα=tumor necrosis factor alpha, anti-TNFα Ab=TNFα blocking antibody, TNFRII-Fc=TNF receptor II Fe-fusion protein, ULOD=upper limit of detection.

[1063] FIG. 4. Cytokine measurement in Example 2: Blood samples of 5 animals were collected 4 and 24 hours after each vehicle and muS110 administration, respectively and TNF, IL-6 and MCP1 serum concentrations were determined using the BD™ CBA Mouse Flex Set System (BD) in accordance to the manufactures instructions.

[1064] FIG. 5. Impact of TNF Blockage on AMG 110 Bioactivity

[1065] FIGS. 6A-C. A) and B): AMG 110-mediated redirected target cell lysis was determined after 24, 48 and 72 hours. TNF and IL-6 concentrations in the cell culture supernatant. C): AMG 103-mediated MCP-1 Secretion: MCP-1 concentrations in cell culture supernatants were quantified by the BD Cytometric CBA human MCP-1 Flex Set. Error bars in both graphs indicate the standard error of the mean of duplicate measurements.

[1066] FIG. 7. VCAM-1 Expression on HUVEC in AMG 103 Co-culture Assays: VCAM-1 expression by flow cytometry. ICAM-1 expression levels are expressed as Median Fluorescence Intensity (MFI). VCAM-1 expressing HUVEC are expressed as percentage of CD31+ HUVEC. Error bars indicate the standard error of the mean of duplicate measurements. Two PBMC donors were used in this experiment.

[1067] A better understanding of the present invention and of its advantages will be obtained from the following examples, offered for illustrative purposes only. The examples are not intended and should not be construed as to limit the scope of the present invention in any way.

### Example 1

[1068] Immunocompetent C57BL/6 mice engineered to express human CD3 (huCD3 knock-in) were pretreated with either a control antibody or two different TNFα blocking agents, an anti-TNFα blocking antibody (anti-TNFα Ab) or a tumor necrosis factor receptor II-Fc fusion protein (TNFRII-Fc). These agents were administered once per day for two days prior to dosing with either an anti-mouse CD19 BiTE® molecule (100 μg/kg or 1000 μg/kg) that recognizes CD19 on B cells, or a negative control BiTE® molecule (n=5 animals per group). Serum cytokines were measured four hours after BiTE® treatment and B cell depletion was measured at 72 hours after BiTE® treatment. The engagement of T cells in vivo using the anti-mouse CD19-targeted BiTE® molecule resulted in activation of T cells, production of cytokines that could be measured in the serum, and depletion of B cells in the spleen. Administration of TNFα blocking reagents prior to BiTE® administration did not affect the ability of the BiTE® molecule to deplete B cells in the spleen (FIG. 1), nor did it impair the release of IFN-γ (FIG. 2), which is important for continued to T cell cytotoxicity, or IL-2 (FIG. 2), which is important for T cell proliferation. However, TNFα blockade did decrease the expression of IL-6 in the serum of animals post-BiTE® administration (FIG. 3). These results show that TNFα blockade can reduce circulating IL-6, which has been implicated in immunotherapy-induced CRS, without affecting BiTE®-mediated cytotoxicity.

### Cytokine Measurements

[1069] Milliplex Mouse Cytokine/Chemokine kits (EMD Millipore) were used on Curiox 96w DropArray microplates per both manufacturers' protocols to test the cytokine levels in the original samples collected. Assays were performed such that contents of one EMD Millipore Milliplex kit was used in smaller amounts on 4 Curiox microplates. The lots of the Curiox plates and all items included in the Millipore kits were as shown in Table 1 below.

| Description | Cat# | Kit lot# |
|---|---|---|
| Pre-mixed blend of analytes | MCYPMX32 | 3136598 |
| Standard | MXM8070-2 | SC7N807-8K |
| QC1 | MXM6070-2 | MCY-108 |
| QC2 | MXM6070-2 | MCY-208 |
| Serum Matrix | MXMSM | 3075213 |
| Detection Antibodies | MXM1070-3 | 3207309 |
| Streptavidin-Phycoerythrin | L-SAPE10 | 3216830 |
| Assay Buffer | L-AB | 3231126 |
| Curiox 96w drop Array | #96-CC-BD- | C96C2219135-B |
| plates | 05 | |
| Curiox Wash Buffer | — | 1x PBS, 0.1% BSA, 0.05% |
| | | Tween20 |
| | | (PBS 14190-136, lot |
| | | 17765965) |

### Preparation of Curiox Items

[1070] All samples were run on four Curiox microplates.
[1071] Two Curiox Humid Boxes were prepared with 8 paper towels and 100 mL PBS.
[1072] Lid sponges on each of two Curiox plates were wetted with 12 mL PBS.
[1073] Plates were blocked with 20 μL/well 1% BSA/PBS
[1074] Plates were left inside humid box on a Titramax 1000 Shaker (Heidolph Instruments) at ˜400 rpm for 30 minutes

### Preparation of Milliplex Reagents

### Beads:

[1075] A premix of beads was used in this assay. Analytes IFNγ, IL-2, IL-6 and TNFα were read by the software and subsequently analyzed.

### Quality Controls:

[1076] One vial of each Quality Control 1 and 2 was reconstituted with 250 μL ddH2O per vial, vortexed lightly (5 seconds), and allowed to sit at room temp for at least 10 minutes before being used.

### Wash Buffer:

[1077] Curiox Wash Buffer (1×PBS, 0.1% BSA, 0.05% Tween20) was created by mixing. Each liter contains:
[1078] 900 mL 1×PBS
[1079] 100 mL 1% BSA in PBS
[1080] 500 μL 10% Tween20 in PBS

### Serum Matrix:

[1081] One vial of lyophilized serum matrix was freshly reconstituted with 2 mL Assay Buffer, left to sit at room temp for 10 minutes and then used according to protocol 5 μL per well in standards, quality control, and blank wells.

### Serum Dilutions:

[1082] Each serum sample was assessed in duplicate and neat only with no dilutions.

### Standard Reconstitution and Dilution:

[1083] One vial of cytokine standard was freshly reconstituted with 250 μL, ddH2O, vortexed lightly (5 seconds), and allowed to sit at room temperature for at least 10 minutes before being diluted and readied for the assay. Standard dilutions were then made at 1:2 such that 100 μL of higher concentrated standard was serially diluted into 100 μL assay buffer to create 13 total dilutions; highest concentration being 10,000 μg/mL, and lowest concentration at 2.4 μg/mL, for all analytes.

### Immunoassay Procedure

[1084] The Curiox plates (currently in Block) were each washed 1×using the Curiox DropArray plate washer. Using reverse pipetting (for more accurate dispensing of pipet contents), the following were added to the plates using the plate layouts captured in ELN 20191022-00064. 5 μL bead mix was added per well to all wells. 5 μL Serum Matrix was added to Standards and Quality Control wells. 5 μL Assay Buffer was added to the sample wells. 5 μL Standards and QC controls were added to the appropriate wells. 5 μL sample was added to the appropriate wells. The plates were each mixed 10 seconds using a Vortex Genie plate mixer at 1000 rpm and then left to incubate in the Humid Boxes on a Titramax Shaker, with the magnet array, at ˜400 rpm overnight at 4° C. The following day, plates were washed 3×using the Curiox DropArray plate washer. 5 μL of biotinylated Detection Antibody was added to each well, plates were mixed 10 seconds using a Vortex Genie plate mixer at 1000 rpm, and then were left to incubate in the Humid Boxes, without magnet array, on a Titramax Shaker at ˜400 rpm for 1 hour at room temperature. 5 4 of Streptavidin-PE-labeled detection antibody was added to each well, plates were mixed 10 seconds using a Vortex Genie plate mixer at 1000 rpm and then were left to incubate in the Humid Boxes, without the magnet array, at ˜400 rpm shaking for 30 minutes at room temperature. The plates were again washed 3×using the Curiox DropArray plate washer. 20 μL of sheath fluid was added to each of the wells, plates were mixed 10 seconds using a Vortex Genie plate mixer at 1000 rpm and then were left to incubate in the Humid Boxes, without the magnet array, on a Titramax Shaker at ˜400 rpm for at least 5 minutes at room temperature. Individual well contents from each of the Curiox microplates were then mixed by pipetting up and down at least 10 times and transferred to the wells in a quadrant of a 384-well plate. After all Curiox plates' contents were transferred, 50 μL/well sheath fluid was added to each 384-well plate (now 70 μL/well), and the 384-well plates were mixed 30 seconds using a Vortex Genie plate mixer at 1000 rpm. The 384-well plate was read on a Luminex FlexMap 3D eader using xPONENT software.

### Spleen Flow Cytometry Analysis

[1085] At the end of the study, animals were euthanized by carbon dioxide asphyxiation followed by physical cervical dislocation. Spleens were removed and collected in RPMI into individual wells of a 24-well plate. Spleens were pulverized through a 100 μm filter, rinsed with PBS, and 100 μL counting beads (Invitrogen, cat: 01-2222-42, lot:2037700, Carlsbad, Calif.) were added. The disaggregated spleens were then centrifuged at 500 rpm for 5 minutes at 4° C. After decanting the supernatant, the cell pellet was lysed with 1 mL RBC lysis buffer (Unity Lab Services, Amgen, South San Francisco) and quenched with FACS buffer containing FBS (2%). Cells were centrifuged a second time at 500 rpm for 5 minutes at 4° C. After decanting the supernatant, the cell pellet was resuspended in 1 mL FBS-free media. 200 μL of cell suspension was transferred to a 96-well V-bottom plate, live/dead dye exclusion (Invitrogen, Eugene, Oreg.) was added (at a 1:500 dilution) and the cells were incubated for 45 minutes at room temperature in the dark. Cells were washed, centrifuged as previously, and resuspended in 50 μL of Fc block (BD Biosciences, San Jose, Calif.) prior to staining with the following antibodies: BUV395 anti-mouse CD4 clone GK1.5, BV650 anti-mouse CD44 clone IM7, BV421 anti-mouse CD8a clone 53-6.7, PE anti-mouse CD25 clone PC61, BV711 anti-mouse CD62L clone MEL-14 (all from BD Biosciences, San Jose, Calif.), BV510 anti-mouse CD45 clone 30-F11, BV605 anti-mouse Thy1.2 clone 53-2.1, FITC anti-mouse CD19 clone 1D3/CD19, APC anti-mouse CD20 clone SA275A11, AF700 anti-mouse CD69 clone H1.2F3 (all from Biolegend, San Diego, Calif.) and Pe-Cy7 anti-mouse PD1 clone J43 (Thermo Fisher, San Diego, Calif.). Cells were washed and resuspended prior to analysis on a FACSymphony flow cytometer (BD Biosciences, San Jose, Calif.).

### Statistical Analysis

[1086] Graphs were generated, and data analysis was performed using GraphPad Prism software (version 7.04, Lo Jolla, Calif.). Mean serum cytokine levels and B cell counts (n=5 animals per group) were expressed as the mean±standard deviation. The p value of 0.05 was used to determine significant differences between all groups using a one-way ANOVA with Tukey's test (GraphPad Prism).

### Example 2

[1087] Female BALB/cJ Rj mice (n=10/group) were treated with either vehicle or the BiTE® antibody construct muS110, directed against murine Epithelial Cell Adhesion Molecule for 2 days (Table 2). Animals in group 3 were pre-treated with etanercept (Enbrel) on days −2 and −1 as well as 1 hour before each muS110 administration. Animals in group 4 were administered an anti-IL6 monoclonal antibody (MP5-20F3, BD) on day −1 and one hour before each muS110 treatment. Blood samples were collected 4 and 24 hours after each vehicle and muS110 administration and serum concentrations of IL-6, TNF and MCP1 were determined using the BD™ CBA Mouse Enhanced Sensitivity Flex Set System (Becton Dickinson, BD) in accordance to the manufacturer's instructions (Table 2).

TABLE 2
Study Design

| | | | Route of | |
|---|---|---|---|---|
| | | | Administra- | Treatment |
| Group | Compound | Dosages | tion | Schedule* |
| 1 | Vehicle | — | i.v. | Days: 1, 2 |
| 2 | muS110 | 0.05 g/kg/d | i.v. | Days: 1, 2 |
| 3 | Enbrel + | Enbrel*: 10 | Enbrel: | Enbrel: |
| | muS110 | mg/kg/d | i.p. | days −2, −1, |
| | | muS110: 0.05 | muS110: | 1, 2 |
| | | mg/kg/d | i.v. | muS110: days 1, |
| | | | | 2 |
| 4 | Anti-IL6 + | Anti-IL6: 2.5 | mAb: i.v. | Anti-IL6: |
| | muS110 | mg/kg/d | muS110: | days −1, 1 |
| | | muS110: 0.05 | i.v. | muS110: days 1, |
| | | mg/kg/d | | 2 |

Etanercept (Enbrel*) and the anti-IL6 monoclonal antibody were administered 1 hour before muS110 treatment on days 1 and 2.

### In Vitro Anti-TNF Assay

[1088] Cytotoxicity, T-cell activation (CD69 upregulation) and cytokine release were determined in multiparametric cytotoxicity assays. Redirected T cell cytotoxicity was evaluated by flow cytometry using isolated human CD3+ T cells as effector cells and Epithelial Cell Adhesion Molecule (EpCAM)-expressing KatoIII tumor cells as target cells. Effector and target cells were co-cultured at an E:T cell ratio of 10:1 and serial dilutions of BiTE® antibody construct AMG110, directed against murine Epithelial Cell Adhesion Molecule in the absence or presence of an anti-TNF monoclonal antibody (BD) or the respective isotype control. AMG 110-mediated redirected target cell lysis was determined after 24, 48 and 72 hours (as shown in FIGS. 6A and 6B). TNF and IL-6 concentrations in the cell culture supernatant were measured with the CBA human TH1/TH2 Kit in accordance to the manufacturer's instruction.

### BiTE® Molecule Induced MCP-1 Release Blocked by Etanercept (Enbrel)

[1089] Human umbilical vein endothelial cells (HUVEC) were co-cultured with CD19-expressing NALM-6 cells and human PBMC and increasing concentrations of BiTE® antibody construct blinatumumab (AMG 103) against CD19 in the absence or presence of etanercept. MCP-1 concentrations were determined with the BD Cytometric CBA human MCP-1 Flex set system (BD, Germany after 2 and hours, respectively according to the manufacturer's instructions and are shown in FIG. 6C.

### Blinatumumab VCAM Assay

[1090] The effect of blinatumumab (AMG 103) on T cell activation and the induction of VCAM-1 on endothelial cells was analyzed in co-cultures of HUVEC, isolated T cells and CD19-expressing NALM-6 target cells. VCAM-1 expression on CD31+ HUVEC was analyzed by flow cytometry. The T cell activation marker VCAM-1 was up-regulated by AMG 103, which was sensitive to etanercept, indicating the potential role of TNF in BiTE® molecule-mediated endothelial activation (FIG. 7).

### Example 3

[1091] Results with the antibody construct blinatumomab (CD19×CD3) demonstrate that TNF levels increased rapidly after the blinatumomab in cycle 1, reaching maximum levels within 2 hours, and reach peak levels earlier than other cytokines. CRS symptoms seem to be mediated by cytokines including interleukin-6 (IL-6) and TNF, tocilizumab and etanercept are evaluated, which block IL-6 and TNF, respectively, as separate premedications for CRS prophylaxis in subjects with RJR AML. Blocking TNF with etanercept premedication may prevent CRS or decrease the frequency and severity of CRS symptoms.

[1092] In a clinical study that is performed as described in study NCT02520427 (clinicaltrials.gov) in patients that have relapsed/refractory Acute Myeloid Leukemia, a recombinant monoclonal bispecific T-cell engager (BITE®) antibody construct directed against CD33 on target cells that simultaneously binds to CD3 on T cells (CD33×CD3-BiTE) was investigated. Previously, dexamethasone premedication was used for prophylaxis of CRS 1 hour before CD33×CD3-BiTE molecule administration. However, dexamethasone is a known immunosuppressant that may have an influence on the efficacy of said antibody construct.

[1093] Because increased serum IL-6 levels may contribute to the development of CRS symptoms, blocking interactions of IL-6 with its receptor (IL-6R) using tocilizumab as a premedication to prevent CRS or decrease the frequency and severity of CRS symptoms. IL-6 levels increase within first 6 hours following CD33×CD3-BiTE administration. Thus, tocilizumab was given to subjects 1 hour prior to CD33×CD3-BiTE administration to allow a blockade of the pro-inflammatory effects mediated by IL-6 upon the increase of its levels. Tocilizumab as a premedication for CRS prophylaxis was evaluated at the dose approved for treatment of CRS (8 mg/kg administered intravenously).

[1094] Further, pretreatment with etanercept to block the biological effects of TNF, which is released by T cells in response to CD33×CD3-BiTE treatment, was evaluated. Etanercept was administered subcutaneously (SC) at the approved dose of 50 mg on days −1 and 4 relative to the first dose of CD33×CD3-BiTE. This dose and timing were selected based on the PK properties of etanercept (slow absorption with mean±SD time of maximum concentration [tmax] of 69±34 hours; half-life of 102±30 hours) (Enbrel US Prescribing Information; Zhou et al, 2011), and on the direct relationship between the PK and PD of etanercept. Specifically, within 24 hours of etanercept administration, there is a significant increase in the inactive form of TNF (Madhusudan et al, 2005) and a decrease in IL-6 concentrations (Sato et al, 2011). The etanercept concentrations achieved from a 50-mg dose were expected to be within the dose target range (ie, 0.5 to 2 μg/mL as established for patients with rheumatoid arthritis; Breedveld et al, 2018) before the first dose of CD33×CD3-BiTE was administered on day 1 and remained above the lower target range up to day 14. Comparable peak TNF concentrations after administration of the BiTE antibody constructs blinatumomab and a half-life extended CD33×CD3-BiTE-binding T-cell engaging antibody construct have been observed in patients with cancer (30 to 60 μg/mL) and rheumatoid arthritis (mean peak levels of 32.9 and 31.6 μg/mL) (Nagele et al, 2017; Ebrahimi et al, 2009; Manicourt et al, 1993). Accordingly, an etanercept target range of 0.5 to 2 μg/mL was expected to provide adequate TNF inhibition and mitigate the CRS risk associated with administration of the first dose of CD33×CD3-BiTE.

[1095] Prior to administration of CD33×CD3-BiTE at increasing doses, subjects with R/R AML received tocilizumab (group 1) or etanercept (group 2) instead of dexamethasone. Tocilizumab (8 mg/kg IV) was administered on the first day of each cycle 1 hour before the first dose of AMG 330; etanercept (50 mg SC) was administered on study days −1 and 4.

[1096] Each premedication treatment group comprised a total of 6 evaluable subjects. Within each group, 3 subjects were initially enrolled and administered tocilizumab (8 mg/kg) or etanercept (50 mg) premedication as described above followed by treatment with CD33×CD3-BiTE. For these initial 3 subjects in each group, once no more than 1 dose-limiting toxicity (DLT) was observed within the DLT window, then the study was expanded to enroll 6 subjects for that group. If 2 subjects had a DLT in either group, then, upon resolution of the adverse event, these subjects proceeded with a combination of tocilizumab plus dexamethasone (group 1) or etanercept plus dexamethasone (group 2). The remaining subjects for the group for treatment were treated with the combination regimen (ie, tocilizumab plus dexamethasone [group 1] or etanercept plus dexamethasone [group 2]) for CRS prophylaxis. If no more than 1 DLT was observed in the 6 evaluable subjects in either group, then the premedication used in that group was considered safe and tolerable, substudy 2, in which either tocilizumab or etanercept were evaluated as single agent for CRS prophylaxis was initiated.

[1097] Subjects who received tocilizumab or etanercept prior to administration of AMG 330 were monitored for CRS using the guidance currently described in Protocol 20120252. Briefly, subjects were monitored for clinical signs (e.g., fever, hypotension, tachycardia, dyspnea, tremors) and laboratory changes (eg, transaminase increase) which may be related to CRS. If a subject treated with CD33×CD3-BiTE at the 10-μg step dose level developed grade 2 or higher CRS, the subject continued the study using both tocilizumab and dexamethasone or etanercept and dexamethasone as premedication for CRS prophylaxis to assess whether a combination regimen is more effective than monotherapy for CRS prophylaxis. When a subject treated with CD33×CD3-BiTE at the target dose level developed grade 3 or higher CRS, CD33×CD3-BiTE was stopped until the severity of CRS decreases to grade 1, at which point the subject was able to restart the study using both tocilizumab and dexamethasone or etanercept and dexamethasone as premedication for CRS prophylaxis.

[1098] For those patients from study part 1 in which it was shown that CRS incidence/severity with tocilizumab or etanercept is similar to that observed with dexamethasone premedication (ie, 1 DLT and some reported grade 2 CRS events in the etanercept or tocilizumab group), a mini-step approach was tested to improve CRS onset dynamics. With this approach, subjects were treated with tocilizumab or etanercept premedication followed by CD33×CD3-BiTE administered with daily mini-step doses, followed by the target dose.

[1099] For those patients from study part 1 in which it was shown that CRS incidence/severity with tocilizumab or etanercept was lower than that with dexamethasone premedication (ie, no DLTs and no reported grade 2 CRS events in the etanercept or tocilizumab group), a maxi-step approach was tested to reach the efficacious dose faster. With this approach, subjects were treated with tocilizumab or etanercept premedication followed by administration of CD33×CD3-BiTE at increasing doses.

[1100] For those patients from study part 1 in which combination regimen (ie, tocilizumab and dexamethasone or etanercept and dexamethasone as premedication for CRS prophylaxis) was needed, a similar approach has been used to determine whether the mini-step or maxi-step approach should be tested in part 2 for the combination regimen.

### Example 4

[1101] In this example, it is further evaluated, if pretreatment with etanercept will block the biological effects of TNF, which is released by T cells in response to treatment with an antibody construct binding FLT3 and CD3 (Flt3×CD3-BiTE). TNF levels after Flt3×CD3-BiTE infusion are consistent with that of blinatumomab, with TNF-α and IL-6 peak levels seen at 6 hour collection time points after Flt3×CD3-BiTE dosing. Collectively, these data demonstrate consistent and reproducible cytokine release after BiTE therapy infusion.

[1102] Etanercept at 50 mg dose was given on day minus 2 relative to the first dose of Flt3×CD3-BiTE. This dose and timing were selected based on the PK/PD properties of etanercept, which showed slow absorption (mean±SD time of maximum concentration [tmax] of 69±34 hours) (Enbrel US Prescribing Information; Zhou et al, 2011), and is expected to provide maximal TNF inhibition by the time of Flt3×CD3-BiTE dosing.

[1103] As mentioned above in Example 3, approximately similar peak TNF concentrations after administration of the BiTE antibody constructs Flt3×CD3-BiTE, blinatumomab, and others have been observed in patients with cancer (30 to 60 μg/mL) and rheumatoid arthritis (mean peak levels of 32.9 and 31.6 μg/mL) (Nagele et al, 2017; Ebrahimi et al, 2009; Manicourt et al, 1993). These results suggest that an etanercept target range of 0.5 to 2 μg/mL provides adequate TNF inhibition and mitigate the CRS risk associated with administration of the first dose of Flt3×CD3-BiTE.

[1104] During dose escalation, a separate parallel substudy evaluated the effect of etanercept with dexamethasone and etanercept alone for CRS prophylaxis. This substudy will run in parallel to the primary dose escalation, which currently requires administration of a prophylactic steroid dose (8 mg IV dexamethasone) within 1 hour prior to start of Flt3×CD3-BiTE infusion, and prior to each dose step of Flt3×CD3-BiTE, to mitigate CRS.

[1105] This substudy tested as to whether the inhibition of TNF lead to decreased rates and/or grades of CRS symptoms by blocking this early and necessary cytokine. The results of this substudy assess better CRS risk mitigation strategies for subjects and obviate the need for prophylactic dexamethasone.

[1106] Six subjects received an initial dose of Flt3×CD3-BiTE and etanercept/dexamethasone prophylaxis and were monitored for decreased or similar rates or grades of CRS (overall CRS rate <60%, or grade ≥2 CRS in <40% of subjects) compared to subjects who received only dexamethasone premedication. Subsequently, higher dose levels of Flt3×CD3-BiTE that had been cleared as safe and tolerable, were tested in an additional 3-6 subjects. These additional 3-6 subject who received Flt3×CD3-BiTE were monitored for the occurrence of decreased or similar rates or grades of CRS (overall CRS rate <75%, or grade ≥2 CRS in <75% of subjects), before etanercept as CRS prophylaxis was tested in an additional 3-6 subjects at the same dose of Flt3×CD3-BiTE.

[1107] Further, 6 subjects who received an initial dose of the Flt3×CD3-BiTE and etanercept/dexamethasone prophylaxis were monitored for the occurrence of decreased or similar rates or grades of CRS (overall CRS rate <60%, or grade ≥2 CRS in <40% of subjects) compared to subjects who received only dexamethasone premedication, and subsequently testing of only etanercept as CRS prophylaxis in an additional 3-6 subjects at the same dose cohort level of Flt3×CD3-BiTE was performed.

[1108] During dose escalation, a separate parallel substudy evaluated subjects to test the effect of etanercept with dexamethasone and etanercept alone for CRS prophylaxis. This substudy was run in parallel to the primary dose escalation, which required administration of a prophylactic steroid dose (8 mg IV dexamethasone) within 1 hour prior to start of Flt3×CD3-BiTE infusion prior to each dose step of Flt3×CD3-BiTE, to mitigate CRS. This substudy tested the hypothesis that inhibition of TNF leads to decreased rates and/or grades of CRS symptoms by blocking this early and necessary cytokine.

### Example 5

[1109] Etanercept Prophylaxis for PSMA-targeting BiTE related CRS in humans: Etanercept premedication occurred within two days before BiTE administration to assess whether prophylaxis with the TNF-α inhibitor decreases the frequency and severity of CRS without compromising the efficacy of the BiTE. In an initial cohort of 6 to 8 subjects, the PSMA-targeting BiTE is administered. In addition to dexamethasone prophylaxis, subjects in the cohort received prophylaxis with etanercept (50 mg subcutaneously [SC]) two days prior to each dose of PSMA-targeting BiTE in the first administration cycle. This dose and timing was selected based on the PK properties of etanercept (slow absorption with mean SD time of maximum concentration [tmax] of 69±34 hours; half-life of 102 f 30 hours) (Enbrel Package Insert, 2017; Zhou et al, 2011).

[1110] Subject incidence of safety events, including dose-limiting toxicities (DLTs), serious adverse events (SAEs), and adverse events leading to treatment discontinuation or dose reduction, will be reviewed when at least 3 DLT-evaluable subjects complete the DLT window. Subjects receiving three individual increasing doses of PSMA-targeting BiTE with etancercept prophylaxis experienced 1 DLT/SAE (grade 3 (G3) thrombocytopenia), 1 SAE (Grade 3 (G3) Afib), 0 dose reductions, 1 discontinuation (tolerability), CRS events in cycle 1: 4 grade 2 (G2), no grade 3/4 (G3/4). Etanercept prophylaxis improves CRS safety profile compared with no premedication or premedication with tocilizumab (8 mg/kg) given two hours before administration of the first dose of the PSMA-targeting BiTE. In the latter group 1 DLT/SAE (G3 Hypoacusis), 2 SAE (grade 3 (G3) Pruritus, grade 2/3 (G2/G3) CRS), 2 dose reductions, 2 discontinuations (disease progression), and CRS events in cycle 1: 4 grade 1 (G1), 7 grade 2 (G2), 4 grade 3 (G3) were observed. In the etanercept prophylaxis group the PSMA-targeting BiTE was administered at the same dosages and frequency as in the group without etanercept prophylaxis.

### Example 6

[1111] Adult patients with R/R AML received one cycle of continuous IV infusions of CD33×CD3 BiTE® molecules at increasing doses (10 μg, 60 μg and 240 μg on days 1, 3 and 6) preceded by administration of either 50 mg etanercept subcutaneously (about 24 hours prior to the initial administration of the 10 μg BiTE-treatment) or 8 mg dexamethasone IV (about 30 minutes prior to the initial administration of the 10 μg BiTE-treatment).

[1112] Etanercept-mediated CRS prevention is at least comparable to or even slightly better than CRS prevention with dexamethasone. Surprisingly, the duration of CRS in patients treated with etanercept for CRS prophylaxis as compared to dexamethasone is considerably shorter as shown in Table 3.

| | (a) Frequency and (b) dura- | (a) Frequency and (b) dura- |
|---|---|---|
| Number of | tion (hrs) of CRS events in | tion (hrs) of CRS events in |
| patients | etanercept-treated group | dexamethasone-treated group |
| 4 | (a) 7 CRS events (1.75 per | — |
| | patient) | |
| | (b) average duration: 12 hrs | |
| 6 | — | (a) 14 CRS events (2.3 per |
| | | patient) |
| | | (b) average duration: 58 hrs |

| SEQ | | | |
|---|---|---|---|
| ID | | Format/ | |
| NO | Designation | Source | Amino acid sequence |
| 1 | CD3ϵ ECD | human | QDGNEENGGITQTPYKVSISGTTVILTCPQYPGSEILWQHNDKNIGGDED |
| | | | DKNIGSDEDHLSLKEFSELEQSGYYVCYPRGSKPEDANFYLYLRARVCEN |
| | | | CNEND |
| 2 | CD3ϵ ECD pos. 1-27 | human | QDGNEENGGITQTPYKVSISGTTVILT |
| 3 | CDR-L1 of H2C | artificial | GSSTGAVTSGYYPN |
| 4 | CDR-L2 of H2C | artificial | GTKFLAP |
| 5 | CDR-L3 of H2C | artificial | ALWYSNRWV |
| 6 | CDR-L1 of E2M | artificial | RSSTGAVTSGYYPN |
| 7 | CDR-L2 of E2M | artificial | ATDNRPS |
| 8 | CDR-L3 of E2M | artificial | ALWYSNRWV |
| 9 | CDR-L1 of F12Q | artificial | GSSTGAVTSGNYPN |
| 10 | CDR-L2 of F12Q | artificial | GTKFLAP |
| 11 | CDR-L3 of F12Q | artificial | VLWYSNRWV |
| 12 | CDR-H1 of F6A | artificial | IYAMN |
| 13 | CDR-H2 of F6A | artificial | RIRSKYNNYATYYADSVKS |
| 14 | CDR-H3 of F6A | artificial | HGNFGNSYVSFFAY |
| 15 | CDR-H1 of H2C | artificial | KYAMN |
| 16 | CDR-H2 of H2C | artificial | RIRSKYNNYATYYADSVKD |
| 17 | CDR-H3 of H2C | artificial | HGNFGNSYISYWAY |
| 18 | CDR-H1 of H1E | artificial | SYAMN |
| 19 | CDR-H2 of H1E | artificial | RIRSKYNNYATYYADSVKG |
| 20 | CDR-H3 of H1E | artificial | HGNFGNSYLSFWAY |
| 21 | CDR-H1 of G4H | artificial | RYANN |
| 22 | CDR-H2 of G4H | artificial | RIRSKYNNYATYYADSVKG |
| 23 | CDR-H3 of G4H | artificial | HGNFGNSYLSYFAY |
| 24 | CDR-H1 of A2J | artificial | VYANN |
| 25 | CDR-H2 of A2J | artificial | RIRSKYNNYATYYADSVKK |
| 26 | CDR-H3 of A2J | artificial | HGNFGNSYLSWWAY |
| 27 | CDR-H1 of E1L | artificial | KYAMN |
| 28 | CDR-H2 of E1L | artificial | RIRSKYNNYATYYADSVKS |
| 29 | CDR-H3 of E1L | artificial | HGNFGNSYTSYYAY |
| 30 | CDR-H1 of E2M | artificial | GYANN |
| 31 | CDR-H2 of E2M | artificial | RIRSKYNNYATYYADSVKE |
| 32 | CDR-H3 of E2M | artificial | HRNFGNSYLSWFAY |
| 33 | CDR-H1 of F7O | artificial | VYAMN |
| 34 | CDR-H2 of F7O | artificial | RIRSKYNNYATYYADSVKK |
| 35 | CDR-H3 of F7O | artificial | HGNFGNSYISWWAY |
| 36 | CDR-H1 of F12Q | artificial | SYAMN |
| 37 | CDR-H2 of F12Q | artificial | RIRSKYNNYATYYADSVKG |
| 38 | CDR-H3 of F12Q | artificial | HGNFGNSYVSWWAY |
| 39 | CDR-H1 of I2C | artificial | KYAMN |
| 40 | CDR-H2 of I2C | artificial | RIRSKYNNYATYYADSVKD |
| 41 | CDR-H3 of I2C | artificial | HGNFGNSYISYWAY |
| 42 | CDR-L2 of H2C | artificial | GTKFLAP |
| 43 | CDR-L3 of H2C | artificial | ALWYSNRWV |
| 44 | CDR-H1 of H2C | artificial | KYAMN |
| 45 | CDR-L1 of H1E | artificial | GSSTGAVTSGYYPN |
| 46 | CDR-L2 of H1E | artificial | GTKFLAP |
| 47 | CDR-L3 of H1E | artificial | ALWYSNRWV |
| 48 | CDR-H1 of H1E | artificial | SYAMN |
| 49 | CDR-H2 of H1E | artificial | RIRSKYNNYATYYADSVKG |
| 50 | CDR-H3 of H1E | artificial | HGNFGNSYLSFWAY |
| 51 | CDR-L1 of G4H | artificial | GSSTGAVTSGYYPN |
| 52 | CDR-L2 of G4H | artificial | GTKFLAP |
| 53 | CDR-L3 of G4H | artificial | ALWYSNRWV |
| 54 | CDR-L1 of A2J | artificial | RSSTGAVTSGYYPN |
| 55 | CDR-L2 of A2J | artificial | ATDMRPS |
| 56 | CDR-L3 of A2J | artificial | ALWYSNRWV |
| 57 | CDR-L1 of E1L | artificial | GSSTGAVTSGYYPN |
| 58 | CDR-L2 of E1L | artificial | GTKFLAP |
| 59 | CDR-L3 of E1L | artificial | ALWYSNRWV |
| 60 | CDR-L1 of F7O | artificial | GSSTGAVTSGYYPN |
| 61 | CDR-L2 of F7O | artificial | GTKFLAP |
| 62 | CDR-L3 of F7O | artificial | ALWYSNRWV |
| 63 | CDR-L1 of I2C | artificial | GSSTGAVTSGNYPN |
| 64 | CDR-L2 of I2C | artificial | GTKFLAP |
| 65 | CDR-L3 of I2C | artificial | VLWYSNRWV |
| 66 | VL of H2C | artificial | QTVVTQEPSLTVSPGGTVTLTCGSSTGAVTSGYYPNWVQQKPGQAPRGLI |
| | | | GGTKFLAPGTPARFSGSLLGGKAALTLSGVQPEDEAEYYCALWYSNRWVF |
| | | | GGGTKLTVL |
| 67 | VL of E2M | artificial | QTVVTQEPSLTVSPGGTVTLTCRSSTGAVTSGYYPNWVQQKPGQAPRGLI |
| | | | GATDMRPSGTPARFSGSLLGGKAALTLSGVQPEDEAEYYCALWYSNRWVF |
| | | | GGGTKLTVL |
| 68 | VL of F12Q | artificial | QTVVTQEPSLTVSPGGTVTLTCGSSTGAVTSGNYPNWVQQKPGQAPRGLI |
| | | | GGTKFLAPGTPARFSGSLLGGKAALTLSGVQPEDEAEYYCVLWYSNRWVF |
| | | | GGGTKLTVL |
| 69 | VL variant of H2C | artificial | ELVVTQEPSLTVSPGGTVTLTCGSSTGAVTSGYYPNWVQQKPGQAPRGLI |
| | | | GGTKFLAPGTPARFSGSLLGGKAALTLSGVQPEDEAEYYCALWYSNRWVF |
| | | | GGGTKLTVL |
| 70 | VL variant of A2J | artificial | ELVVTQEPSLTVSPGGTVTLTCRSSTGAVTSGYYPNWVQQKPGQAPRGLI |
| | | | GATDMRPSGTPARFSGSLLGGKAALTLSGVQPEDEAEYYCALWYSNRWVF |
| | | | GGGTKLTVL |
| 71 | VL variant of F12Q | artificial | ELVVTQEPSLTVSPGGTVTLTCGSSTGAVTSGNYPNWVQQKPGQAPRGLI |
| | | | GGTKFLAPGTPARFSGSLLGGKAALTLSGVQPEDEAEYYCVLWYSNRWVF |
| | | | GGGTKLTVL |
| 72 | VH of F6A | artificial | EVQLVESGGGLVQPGGSLKLSCAASGFTFNIYAMNWVRQAPGKGLEWVAR |
| | | | IRSKYNNYATYYADSVKSRFTISRDDSKNTAYLQMNNLKTEDTAVYYCVR |
| | | | HGNFGNSYVSFFAYWGQGTLVTVSS |
| 73 | VH of H2C | artificial | EVQLVESGGGLVQPGGSLKLSCAASGFTFNKYAMNWVRQAPGKGLEWVAR |
| | | | IRSKYNNYATYYADSVKDRFTISRDDSKNTAYLQMNNLKTEDTAVYYCVR |
| | | | HGNFGNSYISYWAYWGQGTLVTVSS |
| 74 | VH of H1E | artificial | EVQLVESGGGLEQPGGSLKLSCAASGFTFNSYAMNWVRQAPGKGLEWVAR |
| | | | IRSKYNNYATYYADSVKGRFTISRDDSKNTAYLQMNNLKTEDTAVYYCVR |
| | | | HGNFGNSYLSFWAYWGQGTLVTVSS |
| 75 | VH of G4H | artificial | EVQLVESGGGLVQPGGSLKLSCAASGFTFNRYAMNWVRQAPGKGLEWVAR |
| | | | IRSKYNNYATYYADSVKGRFTISRDDSKNTAYLQMNNLKTEDTAVYYCVR |
| | | | HGNFGNSYLSYFAYWGQGTLVTVSS |
| 76 | VH of A2J | artificial | EVQLVESGGGLVQPGGSLKLSCAASGFTFNVYAMNWVRQAPGKGLEWVAR |
| | | | IRSKYNNYATYYADSVKKRFTISRDDSKNTAYLQMNNLKTEDTAVYYCVR |
| | | | HGNFGNSYLSWWAYWGQGTLVTVSS |
| 77 | VH of E1L | artificial | EVQLVESGGGLVQPGGSLKLSCAASGFTFNKYAMNWVRQAPGKGLEWVAR |
| | | | IRSKYNNYATYYADSVKSRFTISRDDSKNTAYLQMNNLKTEDTAVYYCVR |
| | | | HGNFGNSYTSYYAYWGQGTLVTVSS |
| 78 | VH of E2M | artificial | EVQLVESGGGLVQPGGSLKLSCAASGFTFNGYAMNWVRQAPGKGLEWVAR |
| | | | IRSKYNNYATYYADSVKERFTISRDDSKNTAYLQMNNLKTEDTAVYYCVR |
| | | | HRNFGNSYLSWFAYWGQGTLVTVSS |
| 79 | VH of F7O | artificial | EVQLVESGGGLVQPGGSLKLSCAASGFTFNVYAMNWVRQAPGKGLEWVAR |
| | | | IRSKYNNYATYYADSVKKRFTISRDDSKNTAYLQMNNLKTEDTAVYYCVR |
| | | | HGNFGNSYISWWAYWGQGTLVTVSS |
| 80 | VH of F12Q | artificial | EVQLVESGGGLVQPGGSLKLSCAASGFTFNSYAMNWVRQAPGKGLEWVAR |
| | | | IRSKYNNYATYYADSVKGRFTISRDDSKNTAYLQMNNLKTEDTAVYYCVR |
| | | | HGNFGNSYVSWWAYWGQGTLVTVSS |
| 81 | VH of I2C | artificial | EVQLVESGGGLVQPGGSLKLSCAASGFTFNKYAMNWVRQAPGKGLEWVAR |
| | | | IRSKYNNYATYYADSVKDRFTISRDDSKNTAYLQMNNLKTEDTAVYYCVR |
| | | | HGNFGNSYISYWAYWGQGTLVTVSS |
| 82 | VH of F12q | artificial | EVQLVESGGGLVQPGGSLRLSCAASGFTFNSYAMNWVRQAPGKGLEWVAR |
| | | | IRSKYNNYATYYADSVKGRFTISRDDSKNTAYLQMNSLKTEDTAVYYCVR |
| | | | HGNFGNSYVSWWAYWGQGTLVTVSS |
| 83 | VH variant of F6A | artificial | EVQLLESGGGLVQPGGSLKLSCAASGFTFNIYAMNWVRQAPGKGLEWVAR |
| | | | IRSKYNNYATYYADSVKSRFTISRDDSKNTAYLQMNNLKTEDTAVYYCVR |
| | | | HGNFGNSYVSFFAYWGQGTLVTVSS |
| 84 | VH variant of H2C | artificial | EVQLLESGGGLVQPGGSLKLSCAASGFTFNKYAMNWVRQAPGKGLEWVAR |
| | | | IRSKYNNYATYYADSVKDRFTISRDDSKNTAYLQMNNLKTEDTAVYYCVR |
| | | | HGNFGNSYISYWAYWGQGTLVTVSS |
| 85 | VH variant of H1E | artificial | EVQLLESGGGLEQPGGSLKLSCAASGFTFNSYAMNWVRQAPGKGLEWVAR |
| | | | IRSKYNNYATYYADSVKGRFTISRDDSKNTAYLQMNNLKTEDTAVYYCVR |
| | | | HGNFGNSYLSFWAYWGQGTLVTVSS |
| 86 | VH variant of G4H | artificial | EVQLLESGGGLVQPGGSLKLSCAASGFTFNRYAMNWVRQAPGKGLEWVAR |
| | | | IRSKYNNYATYYADSVKGRFTISRDDSKNTAYLQMNNLKTEDTAVYYCVR |
| | | | HGNFGNSYLSYFAYWGQGTLVTVSS |
| 87 | VH variant of A2J | artificial | EVQLLESGGGLVQPGGSLKLSCAASGFTFNVYAMNWVRQAPGKGLEWVAR |
| | | | IRSKYNNYATYYADSVKKRFTISRDDSKNTAYLQMNNLKTEDTAVYYCVR |
| | | | HGNFGNSYLSWWAYWGQGTLVTVSS |
| 88 | VH variant of E1L | artificial | EVQLLESGGGLVQPGGSLKLSCAASGFTFNKYAMNWVRQAPGKGLEWVAR |
| | | | IRSKYNNYATYYADSVKSRFTISRDDSKNTAYLQMNNLKTEDTAVYYCVR |
| | | | HGNFGNSYTSYYAYWGQGTLVTVSS |
| 89 | VH variant of E2M | artificial | EVQLLESGGGLVQPGGSLKLSCAASGFTFNGYAMNWVRQAPGKGLEWVAR |
| | | | IRSKYNNYATYYADSVKERFTISRDDSKNTAYLQMNNLKTEDTAVYYCVR |
| | | | HRNFGNSYLSWFAYWGQGTLVTVSS |
| 90 | VH variant of F7O | artificial | EVQLLESGGGLVQPGGSLKLSCAASGFTFNVYAMNWVRQAPGKGLEWVAR |
| | | | IRSKYNNYATYYADSVKKRFTISRDDSKNTAYLQMNNLKTEDTAVYYCVR |
| | | | HGNFGNSYISWWAYWGQGTLVTVSS |
| 91 | VH variant of F12Q | artificial | EVQLLESGGGLVQPGGSLKLSCAASGFTFNSYAMNWVRQAPGKGLEWVAR |
| | | | IRSKYNNYATYYADSVKGRFTISRDDSKNTAYLQMNNLKTEDTAVYYCVR |
| | | | HGNFGNSYVSWWAYWGQGTLVTVSS |
| 92 | VH variant of I2C | artificial | EVQLLESGGGLVQPGGSLKLSCAASGFTFNKYAMNWVRQAPGKGLEWVAR |
| | | | IRSKYNNYATYYADSVKDRFTISRDDSKNTAYLQMNNLKTEDTAVYYCVR |
| | | | HGNFGNSYISYWAYWGQGTLVTVSS |
| 93 | VL of F6A | artificial | QTVVTQEPSLTVSPGGTVTLTCGSSTGAVTSGYYPNWVQQKPGQAPRGLI |
| | | | GGTKFLAPGTPARFSGSLLGGKAALTLSGVQPEDEAEYYCALWYSNRWVF |
| | | | GGGTKLTVL |
| 94 | VL of H1E | artificial | QTVVTQEPSLTVSPGGTVTLTCGSSTGAVTSGYYPNWVQQKPGQAPRGLI |
| | | | GGTKFLAPGTPARFSGSLLGGKAALTLSGVQPEDEAEYYCALWYSNRWVF |
| | | | GGGTKLTVL |
| 95 | VL of G4H | artificial | QTVVTQEPSLTVSPGGTVTLTCGSSTGAVTSGYYPNWVQQKPGQAPRGLI |
| | | | GGTKFLAPGTPARFSGSLLGGKAALTLSGVQPEDEAEYYCALWYSNRWVF |
| | | | GGGTKLTVL |
| 96 | VL of A2J | artificial | QTVVTQEPSLTVSPGGTVTLTCRSSTGAVTSGYYPNWVQQKPGQAPRGLI |
| | | | GATDMRPSGTPARFSGSLLGGKAALTLSGVQPEDEAEYYCALWYSNRWVF |
| | | | GGGTKLTVL |
| 97 | VL of E1L | artificial | QTVVTQEPSLTVSPGGTVTLTCGSSTGAVTSGYYPNWVQQKPGQAPRGLI |
| | | | GGTKFLAPGTPARFSGSLLGGKAALTLSGVQPEDEAEYYCALWYSNRWVF |
| | | | GGGTKLTVL |
| 98 | VL of F7O | artificial | QTVVTQEPSLTVSPGGTVTLTCGSSTGAVTSGYYPNWVQQKPGQAPRGLI |
| | | | GGTKFLAPGTPARFSGSLLGGKAALTLSGVQPEDEAEYYCALWYSNRWVF |
| | | | GGGTKLTVL |
| 99 | VL of I2C | artificial | QTVVTQEPSLTVSPGGTVTLTCGSSTGAVTSGNYPNWVQQKPGQAPRGLI |
| | | | GGTKFLAPGTPARFSGSLLGGKAALTLSGVQPEDEAEYYCVLWYSNRWVF |
| | | | GGGTKLTVL |
| 100 | VL of F12q | artificial | QTVVTQEPSLTVSPGGTVTLTCGSSTGAVTSGNYPNWVQQKPGQAPRGLI |
| | | | GGTKFLAPGTPARFSGSLLGGKAALTLSGVQPEDEAEYYCVLWYSNRWVF |
| | | | GGGTKLTVL |
| 101 | scFv of F6A | artificial | EVQLVESGGGLVQPGGSLKLSCAASGFTFNIYAMNWVRQAPGKGLEWVAR |
| | | | IRSKYNNYATYYADSVKSRFTISRDDSKNTAYLQMNNLKTEDTAVYYCVR |
| | | | HGNFGNSYVSFFAYWGQGTLVTVSSGGGGSGGGGSGGGGSQTVVTQEPSL |
| | | | TVSPGGTVTLTCGSSTGAVTSGYYPNWVQQKPGQAPRGLIGGTKFLAPGT |
| | | | PARFSGSLLGGKAALTLSGVQPEDEAEYYCALWYSNRWVFGGGTKLTVL |
| 102 | scFv of H2C | artificial | EVQLVESGGGLVQPGGSLKLSCAASGFTFNKYAMNWVRQAPGKGLEWVAR |
| | | | IRSKYNNYATYYADSVKDRFTISRDDSKNTAYLQMNNLKTEDTAVYYCVR |
| | | | HGNFGNSYISYWAYWGQGTLVTVSSGGGGSGGGGSGGGGSQTVVTQEPSL |
| | | | TVSPGGTVTLTCGSSTGAVTSGYYPNWVQQKPGQAPRGLIGGTKFLAPGT |
| | | | PARFSGSLLGGKAALTLSGVQPEDEAEYYCALWYSNRWVFGGGTKLTVL |
| 103 | scFv of H1E | artificial | EVQLVESGGGLEQPGGSLKLSCAASGFTFNSYAMNWVRQAPGKGLEWVAR |
| | | | IRSKYNNYATYYADSVKGRFTISRDDSKNTAYLQMNNLKTEDTAVYYCVR |
| | | | HGNFGNSYLSFWAYWGQGTLVTVSSGGGGSGGGGSGGGGSQTVVTQEPSL |
| | | | TVSPGGTVTLTCGSSTGAVTSGYYPNWVQQKPGQAPRGLIGGTKFLAPGT |
| | | | PARFSGSLLGGKAALTLSGVQPEDEAEYYCALWYSNRWVFGGGTKLTVL |
| 104 | scFv of G4H | artificial | EVQLVESGGGLVQPGGSLKLSCAASGFTFNRYAMNWVRQAPGKGLEWVAR |
| | | | IRSKYNNYATYYADSVKGRFTISRDDSKNTAYLQMNNLKTEDTAVYYCVR |
| | | | HGNFGNSYLSYFAYWGQGTLVTVSSGGGGSGGGGSGGGGSQTVVTQEPSL |
| | | | TVSPGGTVTLTCGSSTGAVTSGYYPNWVQQKPGQAPRGLIGGTKFLAPGT |
| | | | PARFSGSLLGGKAALTLSGVQPEDEAEYYCALWYSNRWVFGGGTKLTVL |
| 105 | scFv of A2J | artificial | EVQLVESGGGLVQPGGSLKLSCAASGFTFNVYAMNWVRQAPGKGLEWVAR |
| | | | IRSKYNNYATYYADSVKKRFTISRDDSKNTAYLQMNNLKTEDTAVYYCVR |
| | | | HGNFGNSYLSWWAYWGQGTLVTVSSGGGGSGGGGSGGGGSQTVVTQEPSL |
| | | | TVSPGGTVTLTCRSSTGAVTSGYYPNWVQQKPGQAPRGLIGATDMRPSGT |
| | | | PARFSGSLLGGKAALTLSGVQPEDEAEYYCALWYSNRWVFGGGTKLTVL |
| 106 | scFv of E1L | artificial | EVQLVESGGGLVQPGGSLKLSCAASGFTFNKYAMNWVRQAPGKGLEWVAR |
| | | | IRSKYNNYATYYADSVKSRFTISRDDSKNTAYLQMNNLKTEDTAVYYCVR |
| | | | HGNFGNSYTSYYAYWGQGTLVTVSSGGGGSGGGGSGGGGSQTVVTQEPSL |
| | | | TVSPGGTVTLTCGSSTGAVTSGYYPNWVQQKPGQAPRGLIGGTKFLAPGT |
| | | | PARFSGSLLGGKAALTLSGVQPEDEAEYYCALWYSNRWVFGGGTKLTVL |
| 107 | SCEV of E2M | artificial | EVQLVESGGGLVQPGGSLKLSCAASGFTFNGYAMNWVRQAPGKGLEWVAR |
| | | | IRSKYNNYATYYADSVKERFTISRDDSKNTAYLQMNNLKTEDTAVYYCVR |
| | | | HRNFGNSYLSWFAYWGQGTLVTVSSGGGGSGGGGSGGGGSQTVVTQEPSL |
| | | | TVSPGGTVTLTCRSSTGAVTSGYYPNWVQQKPGQAPRGLIGATDMRPSGT |
| | | | PARFSGSLLGGKAALTLSGVQPEDEAEYYCALWYSNRWVFGGGTKLTVL |
| 108 | SCEV of F7O | artificial | EVQLVESGGGLVQPGGSLKLSCAASGFTFNVYAMNWVRQAPGKGLEWVAR |
| | | | IRSKYNNYATYYADSVKKRFTISRDDSKNTAYLQMNNLKTEDTAVYYCVR |
| | | | HGNFGNSYISWWAYWGQGTLVTVSSGGGGSGGGGSGGGGSQTVVTQEPSL |
| | | | TVSPGGTVTLTCGSSTGAVTSGYYPNWVQQKPGQAPRGLIGGTKFLAPGT |
| | | | PARFSGSLLGGKAALTLSGVQPEDEAEYYCALWYSNRWVFGGGTKLTVL |
| 109 | SCEv of F12Q | artificial | EVQLVESGGGLVQPGGSLKLSCAASGFTFNSYAMNWVRQAPGKGLEWVAR |
| | | | IRSKYNNYATYYADSVKGRFTISRDDSKNTAYLQMNNLKTEDTAVYYCVR |
| | | | HGNFGNSYVSWWAYWGQGTLVTVSSGGGGSGGGGSGGGGSQTVVTQEPSL |
| | | | TVSPGGTVTLTCGSSTGAVTSGNYPNWVQQKPGQAPRGLIGGTKFLAPGT |
| | | | PARFSGSLLGGKAALTLSGVQPEDEAEYYCVLWYSNRWVFGGGTKLTVL |
| 110 | scFv of I2C | artificial | EVQLVESGGGLVQPGGSLKLSCAASGFTFNKYAMNWVRQAPGKGLEWVAR |
| | | | IRSKYNNYATYYADSVKDRFTISRDDSKNTAYLQMNNLKTEDTAVYYCVR |
| | | | HGNFGNSYISYWAYWGQGTLVTVSSGGGGSGGGGSGGGGSQTVVTQEPSL |
| | | | TVSPGGTVTLTCGSSTGAVTSGNYPNWVQQKPGQAPRGLIGGTKFLAPGT |
| | | | PARFSGSLLGGKAALTLSGVQPEDEAEYYCVLWYSNRWVFGGGTKLTVL |
| 111 | scFv of F12q | artificial | EVQLVESGGGLVQPGGSLRLSCAASGFTFNSYAMNWVRQAPGKGLEWVAR |
| | | | IRSKYNNYATYYADSVKGRFTISRDDSKNTAYLQMNSLKTEDTAVYYCVR |
| | | | HGNFGNSYVSWWAYWGQGTLVTVSSGGGGSGGGGSGGGGSQTVVTQEPSL |
| | | | TVSPGGTVTLTCGSSTGAVTSGNYPNWVQQKPGQAPRGLIGGTKFLAPGT |
| | | | PARFSGSLLGGKAALTLSGVQPEDEAEYYCVLWYSNRWVFGGGTKLTVL |
| 112 | scFv variant of F6A | artificial | EVQLLESGGGLVQPGGSLKLSCAASGFTFNIYAMNWVRQAPGKGLEWVAR |
| | | | IRSKYNNYATYYADSVKSRFTISRDDSKNTAYLQMNNLKTEDTAVYYCVR |
| | | | HGNFGNSYVSFFAYWGQGTLVTVSSGGGGSGGGGSGGGGSELVVTQEPSL |
| | | | TVSPGGTVTLTCGSSTGAVTSGYYPNWVQQKPGQAPRGLIGGTKFLAPGT |
| | | | PARFSGSLLGGKAALTLSGVQPEDEAEYYCALWYSNRWVFGGGTKLTVL |
| 113 | scFv variant of H2C | artificial | EVQLLESGGGLVQPGGSLKLSCAASGFTFNKYAMNWVRQAPGKGLEWVAR |
| | | | IRSKYNNYATYYADSVKDRFTISRDDSKNTAYLQMNNLKTEDTAVYYCVR |
| | | | HGNFGNSYISYWAYWGQGTLVTVSSGGGGSGGGGSGGGGSELVVTQEPSL |
| | | | TVSPGGTVTLTCGSSTGAVTSGYYPNWVQQKPGQAPRGLIGGTKFLAPGT |
| | | | PARFSGSLLGGKAALTLSGVQPEDEAEYYCALWYSNRWVFGGGTKLTVL |
| 114 | SCEV variant of H1E | artificial | EVQLLESGGGLEQPGGSLKLSCAASGFTFNSYAMNWVRQAPGKGLEWVAR |
| | | | IRSKYNNYATYYADSVKGRFTISRDDSKNTAYLQMNNLKTEDTAVYYCVR |
| | | | HGNFGNSYLSFWAYWGQGTLVTVSSGGGGSGGGGSGGGGSELVVTQEPSL |
| | | | TVSPGGTVTLTCGSSTGAVTSGYYPNWVQQKPGQAPRGLIGGTKFLAPGT |
| | | | PARFSGSLLGGKAALTLSGVQPEDEAEYYCALWYSNRWVFGGGTKLTVL |
| 115 | SCEV variant of G4H | artificial | EVQLLESGGGLVQPGGSLKLSCAASGFTFNRYAMNWVRQAPGKGLEWVAR |
| | | | IRSKYNNYATYYADSVKGRFTISRDDSKNTAYLQMNNLKTEDTAVYYCVR |
| | | | HGNFGNSYLSYFAYWGQGTLVTVSSGGGGSGGGGSGGGGSELVVTQEPSL |
| | | | TVSPGGTVTLTCGSSTGAVTSGYYPNWVQQKPGQAPRGLIGGTKFLAPGT |
| | | | PARFSGSLLGGKAALTLSGVQPEDEAEYYCALWYSNRWVFGGGTKLTVL |
| 116 | SCEV variant of A2J | artificial | EVQLLESGGGLVQPGGSLKLSCAASGFTFNVYAMNWVRQAPGKGLEWVAR |
| | | | IRSKYNNYATYYADSVKKRFTISRDDSKNTAYLQMNNLKTEDTAVYYCVR |
| | | | HGNFGNSYLSWWAYWGQGTLVTVSSGGGGSGGGGSGGGGSELVVTQEPSL |
| | | | TVSPGGTVTLTCRSSTGAVTSGYYPNWVQQKPGQAPRGLIGATDMRPSGT |
| | | | PARFSGSLLGGKAALTLSGVQPEDEAEYYCALWYSNRWVFGGGTKLTVL |
| 117 | scFv variant of E1L | artificial | EVQLLESGGGLVQPGGSLKLSCAASGFTFNKYAMNWVRQAPGKGLEWVAR |
| | | | IRSKYNNYATYYADSVKSRFTISRDDSKNTAYLQMNNLKTEDTAVYYCVR |
| | | | HGNFGNSYTSYYAYWGQGTLVTVSSGGGGSGGGGSGGGGSELVVTQEPSL |
| | | | TVSPGGTVTLTCGSSTGAVTSGYYPNWVQQKPGQAPRGLIGGTKFLAPGT |
| | | | PARFSGSLLGGKAALTLSGVQPEDEAEYYCALWYSNRWVFGGGTKLTVL |
| 118 | scFv variant of E2M | artificial | EVQLLESGGGLVQPGGSLKLSCAASGFTFNGYAMNWVRQAPGKGLEWVAR |
| | | | IRSKYNNYATYYADSVKERFTISRDDSKNTAYLQMNNLKTEDTAVYYCVR |
| | | | HRNFGNSYLSWFAYWGQGTLVTVSSGGGGSGGGGSGGGGSELVVTQEPSL |
| | | | TVSPGGTVTLTCRSSTGAVTSGYYPNWVQQKPGQAPRGLIGATDMRPSGT |
| | | | PARFSGSLLGGKAALTLSGVQPEDEAEYYCALWYSNRWVFGGGTKLTVL |
| 119 | scFv variant of F7O | artificial | EVQLLESGGGLVQPGGSLKLSCAASGFTFNVYAMNWVRQAPGKGLEWVAR |
| | | | IRSKYNNYATYYADSVKKRFTISRDDSKNTAYLQMNNLKTEDTAVYYCVR |
| | | | HGNFGNSYISWWAYWGQGTLVTVSSGGGGSGGGGSGGGGSELVVTQEPSL |
| | | | TVSPGGTVTLTCGSSTGAVTSGYYPNWVQQKPGQAPRGLIGGTKFLAPGT |
| | | | PARFSGSLLGGKAALTLSGVQPEDEAEYYCALWYSNRWVFGGGTKLTVL |
| 120 | scFv variant of | artificial | EVQLLESGGGLVQPGGSLKLSCAASGFTFNSYAMNWVRQAPGKGLEWVAR |
| | F12Q | | IRSKYNNYATYYADSVKGRFTISRDDSKNTAYLQMNNLKTEDTAVYYCVR |
| | | | HGNFGNSYVSWWAYWGQGTLVTVSSGGGGSGGGGSGGGGSELVVTQEPSL |
| | | | TVSPGGTVTLTCGSSTGAVTSGNYPNWVQQKPGQAPRGLIGGTKFLAPGT |
| | | | PARFSGSLLGGKAALTLSGVQPEDEAEYYCVLWYSNRWVFGGGTKLTVL |
| 121 | SCEV variant of I2C | artificial | EVQLLESGGGLVQPGGSLKLSCAASGFTFNKYAMNWVRQAPGKGLEWVAR |
| | | | IRSKYNNYATYYADSVKDRFTISRDDSKNTAYLQMNNLKTEDTAVYYCVR |
| | | | HGNFGNSYISYWAYWGQGTLVTVSSGGGGSGGGGSGGGGSELVVTQEPSL |
| | | | TVSPGGTVTLTCGSSTGAVTSGNYPNWVQQKPGQAPRGLIGGTKFLAPGT |
| | | | PARFSGSLLGGKAALTLSGVQPEDEAEYYCVLWYSNRWVFGGGTKLTVL |
| 122 | 20A2 VH CDR1 | artificial | NYGMH |
| 123 | 20A2 VH CDR2 | artificial | LIWYDGSKKYYADSVKG |
| 124 | 20A2 VH CDR3 | artificial | DPSSLTGSTGYYGMDV |
| 125 | 20A2 VL CDR1 | artificial | SGDKLGDKYAC |
| 126 | 20A2 VL CDR2 | artificial | QDRKRPS |
| 127 | 20A2 VL CDR3 | artificial | QAWDSSTEV |
| 128 | 20A2 light chain | artificial | MAWALLLLTLLTQGTGSWASYELTQPPSVSVSPGQTASITCSGDKLGDKY |
| | | | ACWYQQKPGQSPVLVIYQDRKRPSGIPERFSGSNSGNTATLTISGTQAMD |
| | | | EADYYCQAWDSSTEVFGGGT |
| | | | KLTVLGQPKAAPSVTLFPPSSEELQANKATLVCLISDFYPGAVTVAWKAD |
| | | | SSPVKAGVETTTPSKQSNNKYAASSYLSLTPEQWKSHRSYSCQVTHEGST |
| | | | VEKTVAPTECS |
| 129 | 20C1 VH CDR1 | artificial | SYDMS |
| 130 | 20C1 VH CDR2 | artificial | LISGGGSNTYYADSVKG |
| 131 | 20C1 VH CDR3 | artificial | PSGHYFYAMDV |
| 132 | 20C1 VL CDR1 | artificial | RASQGISNWLA |
| 133 | 20C1 VL CDR2 | artificial | AASSLQS |
| 134 | 22D4 VH CDR1 | artificial | DYSMS |
| 135 | 22D4 VH CDR2 | artificial | GINWNGGRTRYADSVKG |
| 136 | 22D4 VH CDR3 | artificial | EFNNFESNWEDP |
| 137 | 22D4 VL CDR1 | artificial | SGDALPKKYAY |
| 138 | 22D4 VL CDR2 | artificial | EDSKRPS |
| 139 | 22D4 VL CDR3 | artificial | YSTDSSGNHRV |
| 140 | 20C1.006 VH CDR1 | artificial | SYDMS |
| 141 | 20C1.006 VH CDR2 | artificial | LISGGGSNTYYAESVKG |
| 142 | 20C1.006 VH CDR3 | artificial | PSGHYFYAMDV |
| 143 | 20C1.006 VL CDR1 | artificial | RASQGISNWLA |
| 144 | 20C1.006 VL CDR2 | artificial | AASSLQS |
| 145 | 20C1.006 VL CDR3 | artificial | QQAESFPHT |
| 146 | 20C1.009 VH CDR1 | artificial | SYDMS |
| 147 | 20C1.009 VH CDR2 | artificial | LISGGGSQTYYAESVKG |
| 148 | 20C1.009 VH CDR3 | artificial | PSGHYFYAMDV |
| 149 | 20C1.009 VL CDR1 | artificial | RASQGISNWLA |
| 150 | 20C1.009 VL CDR2 | artificial | AASSLQS |
| 151 | 20C1.009 VL CDR3 | artificial | QQAESFPHT |
| 152 | 20A2.003 VH CDR1 | artificial | NYGMH |
| 153 | 20A2.003 VH CDR2 | artificial | LIWYDASKKYYAESVKG |
| 154 | 20A2.003 VH CDR3 | artificial | DPSSLTGSTGYYGMDV |
| 155 | 20A2.003 VL CDR1 | artificial | SGDKLGDKYAS |
| 156 | 20A2.003 VL CDR2 | artificial | QDRKRPS |
| 157 | 20A2.003 VL CDR3 | artificial | QAFESSTEV |
| 158 | 22D4.006 VH CDR1 | artificial | DYSMS |
| 159 | 22D4.006 VH CDR2 | artificial | GINWNGGRTRYADAVKG |
| 160 | 22D4.006 VH CDR3 | artificial | EFNNFESNWFDP |
| 161 | 22D4.006 VL CDR1 | artificial | SGDALPKKYAY |
| 162 | 22D4.006 VL CDR2 | artificial | EDAKRPS |
| 163 | 22D4.006 VL CDR3 | artificial | YSTDASGNHRV |
| 164 | 22D4.017 VH CDR1 | artificial | DYSMS |
| 165 | 22D4.017 VH CDR2 | artificial | GINWNAGRTRYADAVKG |
| 166 | 22D4.017 VH CDR3 | artificial | EFNNFESNWFDP |
| 167 | 22D4.017 VL CDR1 | artificial | SGDALPKKYAY |
| 168 | 22D4.017 VL CDR2 | artificial | EDAKRPS |
| 169 | 22D4.017 VL CDR3 | artificial | YSTDASGNHRV |
| 170 | 20A2 VH | artificial | QVQLVESGGGVVQPGRSLRLSCAASGFTFSNYGMHWVRQAPGKGLEWVAL |
| | | | IWYDGSKKYYADSVKGRFTISRDNSKNTLYLQMNSLRAEDTAAYYCARDP |
| | | | SSLTGSTGYYGMDVWGQGTTVTVSS |
| 171 | 20A2 VL | artificial | SYELTQPPSVSVSPGQTASITCSGDKLGDKYACWYQQKPGQSPVLVIYQD |
| | | | RKRPSGIPERFSGSNSGNTATLTISGTQAMDEADYYCQAWDSSTEVFGGG |
| | | | TKLTVL |
| 172 | 20C1 VH | artificial | EVQLLESGGGLVQPGGALRLSCAASGFTFSSYDMSWVRQAPGKGLEWVSL |
| | | | ISGGGSNTYYADSVKGRFTISRDNSKNTLYLQMNSLRAEDTAVYFCASPS |
| | | | GHYFYAMDVWGQGTTVTVSS |
| 173 | 20C1 VL | artificial | DIQMTQSPSSVSASVGDRVTITCRASQGISNWLAWYQQKPGKAPKLLIFA |
| | | | ASSLQSGVPSRFGGSGSGTDFTFTISSLQPEDFATYYCQQADSFPHTFGG |
| | | | GTKVEIK |
| 174 | 22D4 VH | artificial | EVQLVESGGSVVRPGGSLRLSCAASGFTVDDYSMSWVRQVPGKGLEWVSG |
| | | | INWNGGRTRYADSVKGRFTISRDSAKNSLYLQMNSLRAEDTALYYCAREF |
| | | | NNFESNWFDPWGQGTLVTVSS |
| 175 | 22D4 VL | artificial | SYELTQPPSVSVSPGQTARITCSGDALPKKYAYWYQQKSGQAPVLVISED |
| | | | SKRPSGIPERFSGSSSGTMATLTISGAQVEDEADYYCYSTDSSGNHRVFG |
| | | | GGTKLTVL |
| 176 | 20C1.006 VH | artificial | EVQLLESGGGLVQPGGSLRLSCAASGFTFSSYDMSWVRQAPGKGLEWVSL |
| | | | ISGGGSNTYYAESVKGRFTISRDNSKNTLYLQMNSLRAEDTAVYFCASPS |
| | | | GHYFYAMDVWGQGTTVTVSS |
| 177 | 20C1.006 VL | artificial | DIQMTQSPSSVSASVGDRVTITCRASQGISNWLAWYQQKPGKAPKLLIFA |
| | | | ASSLQSGVPSRFSGSGSGTDFTLTISSLQPEDFATYYCQQAESFPHTFGG |
| | | | GTKVEIK |
| 178 | 20C1.009 VH | artificial | EVQLLESGGGLVQPGGSLRLSCAASGFTFSSYDMSWVRQAPGKGLEWVSL |
| | | | ISGGGSQTYYAESVKGRFTISRDNSKNTLYLQMNSLRAEDTAVYFCASPS |
| | | | GHYFYAMDVWGQGTTVTVSS |
| 179 | 20C1.009 VL | artificial | DIQMTQSPSSVSASVGDRVTITCRASQGISNWLAWYQQKPGKAPKLLIFA |
| | | | ASSLQSGVPSRFSGSGSGTDFTLTISSLQPEDFATYYCQQAESFPHTFGG |
| | | | GTKVEIK |
| 180 | 20A2.003 VH | artificial | QVQLVESGGGVVQPGRSLRLSCAASGFTFSNYGMHWVRQAPGKGLEWVAL |
| | | | IWYDASKKYYAESVKGRFTISRDNSKNTLYLQMNSLRAEDTAAYYCARDP |
| | | | SSLTGSTGYYGMDVWGQGTTVTVSS |
| 181 | 20A2.003 VL | artificial | SYELTQPPSVSVSPGQTASITCSGDKLGDKYASWYQQKPGQSPVLVIYQD |
| | | | RKRPSGIPERFSGSNSGNTATLTISGTQAMDEADYYCQAFESSTEVFGGG |
| | | | TKLTVL |
| 182 | 22D4.006 VH | artificial | EVQLVESGGSVVRPGGSLRLSCAASGFTVDDYSMSWVRQVPGKGLEWVSG |
| | | | INWNGGRTRYADAVKGRFTISRDSAKNSLYLQMNSLRAEDTALYYCAREF |
| | | | NNFESNWFDPWGQGTLVTVSS |
| 183 | 22D4.006 VL | artificial | SYELTQPPSVSVSPGQTARITCSGDALPKKYAYWYQQKPGQAPVLVISED |
| | | | AKRPSGIPERFSGSSSGTMATLTISGAQVEDEADYYCYSTDASGNHRVFG |
| | | | GGTKLTVL |
| 184 | 22D4.017 VH | artificial | EVQLVESGGSVVRPGGSLRLSCAASGFTVDDYSMSWVRQVPGKGLEWVSG |
| | | | INWNAGRTRYADAVKGRFTISRDSAKNSLYLQMNSLRAEDTALYYCAREF |
| | | | NNFESNWFDPWGQGTLVTVSS |
| 185 | 22D4.017 VL | artificial | SYELTQPPSVSVSPGQTARITCSGDALPKKYAYWYQQKPGQAPVLVISED |
| | | | AKRPSGIPERFSGSSSGTMATLTISGAQVEDEADYYCYSTDASGNHRVFG |
| | | | GGTKLTVL |
| 186 | 20A2 heavy chain | artificial | MDMRVPAQLLGLLLLWLRGARCQVQLVESGGGVVQPGRSLRLSCAASGFT |
| | | | FSNYGMHWVRQAPGKGLEWVALIWYDGSKKYYADSVKGRFTISRDNSKNT |
| | | | LYLQMNSLRAEDTAAYYCAR |
| | | | DPSSLTGSTGYYGMDVWGQGTTVTVSSASTKGPSVFPLAPSSKSTSGGTA |
| | | | ALGCLVKDYFPEPVTVSWNSGALTSGVHTFPAVLQSSGLYSLSSVVTVPS |
| | | | SSLGTQTYICNVNHKPSNTK |
| | | | VDKKVEPKSCDKTHTCPPCPAPELLGGPSVFLFPPKPKDTLMISRTPEVT |
| | | | CVVVDVSHEDPEVKFNWYVDGVEVHNAKTKPCEEQYGSTYRCVSVLTVLH |
| | | | QDWLNGKEYKCKVSNKALPA |
| | | | PIEKTISKAKGQPREPQVYTLPPSREEMTKNQVSLTCLVKGFYPSDIAVE |
| | | | WESNGQPENNYKTTPPVLDSDGSFFLYSKLTVDKSRWQQGNVFSCSVMHE |
| | | | ALHNHYTQKSLSLSPGK |
| 187 | 20A2 light chain | artificial | MAWALLLLTLLTQGTGSWASYELTQPPSVSVSPGQTASITCSGDKLGDKY |
| | | | ACWYQQKPGQSPVLVIYQDRKRPSGIPERFSGSNSGNTATLTISGTQAMD |
| | | | EADYYCQAWDSSTEVFGGGT |
| | | | KLTVLGQPKAAPSVTLFPPSSEELQANKATLVCLISDFYPGAVTVAWKAD |
| | | | SSPVKAGVETTTPSKQSNNKYAASSYLSLTPEQWKSHRSYSCQVTHEGST |
| | | | VEKTVAPTECS |
| 188 | 20C1 heavy chain | artificial | MDMRVPAQLLGLLLLWLRGARCEVQLLESGGGLVQPGGALRLSCAASGFT |
| | | | FSSYDMSWVRQAPGKGLEWVSLISGGGSNTYYADSVKGRFTISRDNSKNT |
| | | | LYLQMNSLRAEDTAVYFCAS |
| | | | PSGHYFYAMDVWGQGTTVTVSSASTKGPSVFPLAPSSKSTSGGTAALGCL |
| | | | VKDYFPEPVTVSWNSGALTSGVHTFPAVLQSSGLYSLSSVVTVPSSSLGT |
| | | | QTYICNVNHKPSNTKVDKKV |
| | | | EPKSCDKTHTCPPCPAPELLGGPSVFLFPPKPKDTLMISRTPEVTCVVVD |
| | | | VSHEDPEVKFNWYVDGVEVHNAKTKPCEEQYGSTYRCVSVLTVLHQDWLN |
| | | | GKEYKCKVSNKALPAPIEKT |
| | | | ISKAKGQPREPQVYTLPPSREEMTKNQVSLTCLVKGFYPSDIAVEWESNG |
| | | | QPENNYKTTPPVLDSDGSFFLYSKLTVDKSRWQQGNVFSCSVMHEALHNH |
| | | | YTQKSLSLSPGK |
| 189 | 20C1 light chain | artificial | MDMRVPAQLLGLLLLWLRGARCDIQMTQSPSSVSASVGDRVTITCRASQG |
| | | | ISNWLAWYQQKPGKAPKLLIFAASSLQSGVPSRFGGSGSGTDFTFTISSL |
| | | | QPEDFATYYCQQADSFPHTF |
| | | | GGGTKVEIKRTVAAPSVFIFPPSDEQLKSGTASVVCLLNNFYPREAKVQW |
| | | | KVDNALQSGNSQESVTEQDSKDSTYSLSSTLTLSKADYEKHKVYACEVTH |
| | | | QGLSSPVTKSFNRGEC |
| 190 | 22D4 heavy chain | artificial | MDMRVPAQLLGLLLLWLRGARCEVQLVESGGSVVRPGGSLRLSCAASGFT |
| | | | VDDYSMSWVRQVPGKGLEWVSGINWNGGRTRYADSVKGRFTISRDSAKNS |
| | | | LYLQMNSLRAEDTALYYCAR |
| | | | EFNNFESNWFDPWGQGTLVTVSSASTKGPSVFPLAPSSKSTSGGTAALGC |
| | | | LVKDYFPEPVTVSWNSGALTSGVHTFPAVLQSSGLYSLSSVVTVPSSSLG |
| | | | TQTYICNVNHKPSNTKVDKK |
| | | | VEPKSCDKTHTCPPCPAPELLGGPSVFLFPPKPKDTLMISRTPEVTCVVV |
| | | | DVSHEDPEVKFNWYVDGVEVHNAKTKPCEEQYGSTYRCVSVLTVLHODWL |
| | | | NGKEYKCKVSNKALPAPIEK |
| | | | TISKAKGQPREPQVYTLPPSREEMTKNQVSLTCLVKGFYPSDIAVEWESN |
| | | | GQPENNYKTTPPVLDSDGSFFLYSKLTVDKSRWQQGNVFSCSVMHEALHN |
| | | | HYTQKSLSLSPGK |
| 191 | 22D4 light chain | artificial | MAWALLLLTLLTQGTGSWASYELTQPPSVSVSPGQTARITCSGDALPKKY |
| | | | AYWYQQKSGQAPVLVISEDSKRPSGIPERFSGSSSGTMATLTISGAQVED |
| | | | EADYYCYSTDSSGNHRVFGG |
| | | | GTKLTVLGQPKAAPSVTLFPPSSEELQANKATLVCLISDFYPGAVTVAWK |
| | | | ADSSPVKAGVETTTPSKQSNNKYAASSYLSLTPEQWKSHRSYSCQVTHEG |
| | | | STVEKTVAPTECS |
| 192 | 20C1.006 | artificial | MDMRVPAQLLGLLLLWLRGARCEVQLLESGGGLVQPGGSLRLSCAASGFT |
| | heavy chain | | FSSYDMSWVRQAPGKGLEWVSLISGGGSNTYYAESVKGRFTISRDNSKNT |
| | | | LYLQMNSLRAEDTAVYFCAS |
| | | | PSGHYFYAMDVWGQGTTVTVSSASTKGPSVFPLAPSSKSTSGGTAALGCL |
| | | | VKDYFPEPVTVSWNSGALTSGVHTFPAVLQSSGLYSLSSVVTVPSSSLGT |
| | | | QTYICNVNHKPSNTKVDKKV |
| | | | EPKSCDKTHTCPPCPAPELLGGPSVFLFPPKPKDTLMISRTPEVTCVVVD |
| | | | VSHEDPEVKFNWYVDGVEVHNAKTKPCEEQYGSTYRCVSVLTVLHQDWLN |
| | | | GKEYKCKVSNKALPAPIEKT |
| | | | ISKAKGQPREPQVYTLPPSREEMTKNQVSLTCLVKGFYPSDIAVEWESNG |
| | | | QPENNYKTTPPVLDSDGSFFLYSKLTVDKSRWQQGNVFSCSVMHEALHNH |
| | | | YTQKSLSLSPGK |
| 193 | 20C1.006 | artificial | MDMRVPAQLLGLLLLWLRGARCDIQMTQSPSSVSASVGDRVTITCRASQG |
| | light chain | | ISNWLAWYQQKPGKAPKLLIFAASSLQSGVPSRFSGSGSGTDFTLTISSL |
| | | | QPEDFATYYCQQAESFPHTF |
| | | | GGGTKVEIKRTVAAPSVFIFPPSDEQLKSGTASVVCLLNNFYPREAKVQW |
| | | | KVDNALQSGNSQESVTEQDSKDSTYSLSSTLTLSKADYEKHKVYACEVTH |
| | | | QGLSSPVTKSFNRGEC |
| 194 | 20C1.009 | artificial | MDMRVPAQLLGLLLLWLRGARCEVQLLESGGGLVQPGGSLRLSCAASGFT |
| | heavy chain | | FSSYDMSWVRQAPGKGLEWVSLISGGGSQTYYAESVKGRFTISRDNSKNT |
| | | | LYLQMNSLRAEDTAVYFCAS |
| | | | PSGHYFYAMDVWGQGTTVTVSSASTKGPSVFPLAPSSKSTSGGTAALGCL |
| | | | VKDYFPEPVTVSWNSGALTSGVHTFPAVLQSSGLYSLSSVVTVPSSSLGT |
| | | | QTYICNVNHKPSNTKVDKKV |
| | | | EPKSCDKTHTCPPCPAPELLGGPSVFLFPPKPKDTLMISRTPEVTCVVVD |
| | | | VSHEDPEVKFNWYVDGVEVHNAKTKPCEEQYGSTYRCVSVLTVLHQDWLN |
| | | | GKEYKCKVSNKALPAPIEKT |
| | | | ISKAKGQPREPQVYTLPPSREEMTKNQVSLTCLVKGFYPSDIAVEWESNG |
| | | | QPENNYKTTPPVLDSDGSFFLYSKLTVDKSRWQQGNVFSCSVMHEALHNH |
| | | | YTQKSLSLSPGK |
| 195 | 20C1.009 | artificial | MDMRVPAQLLGLLLLWLRGARCDIQMTQSPSSVSASVGDRVTITCRASQG |
| | light chain | | ISNWLAWYQQKPGKAPKLLIFAASSLQSGVPSRFSGSGSGTDFTLTISSL |
| | | | QPEDFATYYCQQAESFPHTF |
| | | | GGGTKVEIKRTVAAPSVFIFPPSDEQLKSGTASVVCLLNNFYPREAKVQW |
| | | | KVDNALQSGNSQESVTEQDSKDSTYSLSSTLTLSKADYEKHKVYACEVTH |
| | | | QGLSSPVTKSFNRGEC |
| 196 | 20A2.003 | artificial | MDMRVPAQLLGLLLLWLRGARCQVQLVESGGGVVQPGRSLRLSCAASGFT |
| | heavy chain | | FSNYGMHWVRQAPGKGLEWVALIWYDASKKYYAESVKGRFTISRDNSKNT |
| | | | LYLQMNSLRAEDTAAYYCAR |
| | | | DPSSLTGSTGYYGMDVWGQGTTVTVSSASTKGPSVFPLAPSSKSTSGGTA |
| | | | ALGCLVKDYFPEPVTVSWNSGALTSGVHTFPAVLQSSGLYSLSSVVTVPS |
| | | | SSLGTQTYICNVNHKPSNTK |
| | | | VDKKVEPKSCDKTHTCPPCPAPELLGGPSVFLFPPKPKDTLMISRTPEVT |
| | | | CVVVDVSHEDPEVKFNWYVDGVEVHNAKTKPCEEQYGSTYRCVSVLTVLH |
| | | | QDWLNGKEYKCKVSNKALPA |
| | | | PIEKTISKAKGQPREPQVYTLPPSREEMTKNQVSLTCLVKGFYPSDIAVE |
| | | | WESNGQPENNYKTTPPVLDSDGSFFLYSKLTVDKSRWQQGNVFSCSVMHE |
| | | | ALHNHYTQKSLSLSPGK |
| 197 | 20A2.003 | artificial | MAWALLLLTLLTQGTGSWASYELTQPPSVSVSPGQTASITCSGDKLGDKY |
| | light chain | | ASWYQQKPGQSPVLVIYQDRKRPSGIPERFSGSNSGNTATLTISGTQAMD |
| | | | EADYYCQAFESSTEVFGGGT |
| | | | KLTVLGQPKAAPSVTLFPPSSEELQANKATLVCLISDFYPGAVTVAWKAD |
| | | | SSPVKAGVETTTPSKQSNNKYAASSYLSLTPEQWKSHRSYSCQVTHEGST |
| | | | VEKTVAPTECS |
| 198 | 22D4.006 | artificial | MDMRVPAQLLGLLLLWLRGARCEVQLVESGGSVVRPGGSLRLSCAASGFT |
| | heavy chain | | VDDYSMSWVRQVPGKGLEWVSGINWNGGRTRYADAVKGRFTISRDSAKNS |
| | | | LYLQMNSLRAEDTALYYCAR |
| | | | EFNNFESNWFDPWGQGTLVTVSSASTKGPSVFPLAPSSKSTSGGTAALGC |
| | | | LVKDYFPEPVTVSWNSGALTSGVHTFPAVLQSSGLYSLSSVVTVPSSSLG |
| | | | TQTYICNVNHKPSNTKVDKK |
| | | | VEPKSCDKTHTCPPCPAPELLGGPSVFLFPPKPKDTLMISRTPEVTCVVV |
| | | | DVSHEDPEVKFNWYVDGVEVHNAKTKPCEEQYGSTYRCVSVLTVLHODWL |
| | | | NGKEYKCKVSNKALPAPIEK |
| | | | TISKAKGQPREPQVYTLPPSREEMTKNQVSLTCLVKGFYPSDIAVEWESN |
| | | | GQPENNYKTTPPVLDSDGSFFLYSKLTVDKSRWQQGNVFSCSVMHEALHN |
| | | | HYTQKSLSLSPGK |
| 199 | 22D4.006 | artificial | MAWALLLLTLLTQGTGSWASYELTQPPSVSVSPGQTARITCSGDALPKKY |
| | light chain | | AYWYQQKPGQAPVLVISEDAKRPSGIPERFSGSSSGTMATLTISGAQVED |
| | | | EADYYCYSTDASGNHRVFGG |
| | | | GTKLTVLGQPKAAPSVTLFPPSSEELQANKATLVCLISDFYPGAVTVAWK |
| | | | ADSSPVKAGVETTTPSKQSNNKYAASSYLSLTPEQWKSHRSYSCQVTHEG |
| | | | STVEKTVAPTECS |
| 200 | 22D4.017 | artificial | MDMRVPAQLLGLLLLWLRGARCEVQLVESGGSVVRPGGSLRLSCAASGFT |
| | heavy chain | | VDDYSMSWVRQVPGKGLEWVSGINWNAGRTRYADAVKGRFTISRDSAKNS |
| | | | LYLQMNSLRAEDTALYYCAR |
| | | | EFNNFESNWFDPWGQGTLVTVSSASTKGPSVFPLAPSSKSTSGGTAALGC |
| | | | LVKDYFPEPVTVSWNSGALTSGVHTFPAVLQSSGLYSLSSVVTVPSSSLG |
| | | | TQTYICNVNHKPSNTKVDKK |
| | | | VEPKSCDKTHTCPPCPAPELLGGPSVFLFPPKPKDTLMISRTPEVTCVVV |
| | | | DVSHEDPEVKFNWYVDGVEVHNAKTKPCEEQYGSTYRCVSVLTVLHQDWL |
| | | | NGKEYKCKVSNKALPAPIEK |
| | | | TISKAKGQPREPQVYTLPPSREEMTKNQVSLTCLVKGFYPSDIAVEWESN |
| | | | GQPENNYKTTPPVLDSDGSFFLYSKLTVDKSRWQQGNVFSCSVMHEALHN |
| | | | HYTQKSLSLSPGK |
| 201 | 22D4.017 | artificial | MAWALLLLTLLTQGTGSWASYELTQPPSVSVSPGQTARITCSGDALPKKY |
| | light chain | | AYWYQQKPGQAPVLVISEDAKRPSGIPERFSGSSSGTMATLTISGAQVED |
| | | | EADYYCYSTDASGNHRVFGG |
| | | | GTKLTVLGQPKAAPSVTLFPPSSEELQANKATLVCLISDFYPGAVTVAWK |
| | | | ADSSPVKAGVETTTPSKQSNNKYAASSYLSLTPEQWKSHRSYSCQVTHEG |
| | | | STVEKTVAPTECS |
| 202 | linker 1 | artificial | GGGG |
| 203 | linker 2 | artificial | GGGGS |
| 204 | linker 3 | artificial | GGGGQ |
| 205 | linker 4 | artificial | SGGGGS |
| 206 | linker 5 | artificial | PGGGGS |
| 207 | linker 6 | artificial | PGGDGS |
| 208 | linker 7 | artificial | GGGGSGGGS |
| 209 | linker 8 = (G₄S)₂ | artificial | GGGGSGGGGS |
| | linker | | |
| 210 | linker 9 = (6₄S)₃ | artificial | GGGGSGGGGSGGGGS |
| | linker | | |
| 211 | (G₄S)₄ linker | artificial | GGGGSGGGGSGGGGSGGGGS |
| 212 | (G₄S)₅ linker | artificial | GGGGSGGGGSGGGGSGGGGSGGGGS |
| 213 | (G₄S)₆ linker | artificial | GGGGSGGGGSGGGGSGGGGSGGGGSGGGGS |
| 214 | (G₄S)₇ linker | artificial | GGGGSGGGGSGGGGSGGGGSGGGGSGGGGSGGGGS |
| 215 | (G₄S)₈ linker | artificial | GGGGSGGGGSGGGGSGGGGSGGGGSGGGGSGGGGSGGGGS |
| 216 | Ab156 | artificial | RDWDFDVFGGGTPVGG |
| 217 | linear FcRn BP | artificial | QRFVTGHFGGLXPANG |
| 218 | linear FcRn BP-Y | artificial | QRFVTGHFGGLYPANG |
| 219 | linear FcRn BP-H | artificial | QRFVTGHFGGLHPANG |
| 220 | core FcRn BP-H | artificial | TGHFGGLHP |
| 221 | cyclic FcRn BP-H | artificial | QRFCTGHFGGLHPCNG |
| 222 | HALB | human | DAHKSEVAHRFKDLGEENFKALVLIAFAQYLQQCPFEDHVKLVNEVTEFA |
| | | | KTCVADESAENCDKSLHTLFGDKLCTVATLRETYGEMADCCAKQEPERNE |
| | | | CFLQHKDDNPNLPRLVRPEVDVMCTAFHDNEETFLKKYLYEIARRHPYFY |
| | | | APELLFFAKRYKAAFTECCQAADKAACLLPKLDELRDEGKASSAKQRLKC |
| | | | ASLQKFGERAFKAWAVARLSQRFPKAEFAEVSKLVTDLTKVHTECCHGDL |
| | | | LECADDRADLAKYICENQDSISSKLKECCEKPLLEKSHCIAEVENDEMPA |
| | | | DLPSLAADFVESKDVCKNYAEAKDVFLGMFLYEYARRHPDYSVVLLLRLA |
| | | | KTYETTLEKCCAAADPHECYAKVFDEFKPLVEEPQNLIKQNCELFEQLGE |
| | | | YKFQNALLVRYTKKVPQVSTPTLVEVSRNLGKVGSKCCKHPEAKRMPCAE |
| | | | DYLSVVLNQLCVLHEKTPVSDRVTKCCTESLVNRRPCFSALEVDETYVPK |
| | | | EFNAETFTFHADICTLSEKERQIKKQTALVELVKHKPKATKEQLKAVMDD |
| | | | FAAFVEKCCKADDKETCFAEEGKKLVAASQAALGL |
| 223 | HALB | artificial | DAHKSEVAHRFKDLGEENFKALVLIAFAQYLQQCPFEDHVKLVNEVTEFA |
| | variant 1 | | KTCVADESAENCDKSLHTLFGDKLCTVATLRETYGEMADCCAKQEPERNE |
| | | | CFLQHKDDNPNLPRLVRPEVDVMCTAFHDNEETFLKKYLYEIARRHPYFY |
| | | | APELLFFAKRYKAAFTECCQAADKAACLLPKLDELRDEGKASSAKQRLKC |
| | | | ASLQKFGERAFKAWAVARLSQRFPKAEFAEVSKLVTDLTKVHTECCHGDL |
| | | | LECADDRADLAKYICENQDSISSKLKECCEKPLLEKSHCIAEVENDEMPA |
| | | | DLPSLAADFVESKDVCKNYAEAKDVFLGMFLYEYARRHPDYSVVLLLRLA |
| | | | KTYETTLEKCCAAADPHECYAKVFDEFKPLVEEPQNLIKQNCELFEQLGE |
| | | | YKFQNALLVRYTKKVPQVSTPTLVEVSRNLGKVGSKCCKHPEAKRMPCAE |
| | | | DYLSVVLNQLCVLHEKTPVSDRVTKCCTESLVNRRPCFSALEVDETYVPK |
| | | | EFNAGTFTFHADICTLSEKERQIKKQTALVELVKHKPKATKEQLKAAMDD |
| | | | FAAFVEKCCKADDKETCFAEEGKKLVAASQAALGL |
| 224 | HALB | artificial | DAHKSEVAHRFKDLGEENFKALVLIAFAQYLQQCPFEDHVKLVNEVTEFA |
| | variant 2 | | KTCVADESAENCDKSLHTLFGDKLCTVATLRETYGEMADCCAKQEPERNE |
| | | | CFLQHKDDNPNLPRLVRPEVDVMCTAFHDNEETFLKKYLYEIARRHPYFY |
| | | | APELLFFAKRYKAAFTECCQAADKAACLLPKLDELRDEGKASSAKQRLKC |
| | | | ASLQKFGERAFKAWAVARLSQRFPKAEFAEVSKLVTDLTKVHTECCHGDL |
| | | | LECADDRADLAKYICENQDSISSKLKECCEKPLLEKSHCIAEVENDEMPA |
| | | | DLPSLAADFVESKDVCKNYAEAKDVFLGMFLYEYARRHPDYSVVLLLRLA |
| | | | KTYETTLEKCCAAADPHECYAKVFDEFKPLVEEPQNLIKQNCELFEQLGE |
| | | | YKFQNALLVRYTKKVPQVSTPTLVEVSRNLGKVGSKCCKHPEAKRMPCAE |
| | | | DYLSVVLNQLCVLHEKTPVSDRVTKCCTESLVNRRPCFSALEVDETYVPK |
| | | | EFNAETFTFHADICTLSEKERQIKKQTALVELVKHKPKATKEQLKAVMDD |
| | | | FAAFVEKCCKADDKETCFAEEGPKLVAASQAALGL |
| 225 | HALB | artificial | DAHKSEVAHRFKDLGEENFKALVLIAFAQYLQQCPFEDHVKLVNEVTEFA |
| | variant 3 | | KTCVADESAENCDKSLHTLFGDKLCTVATLRETYGEMADCCAKQEPERNE |
| | | | CFLQHKDDNPNLPRLVRPEVDVMCTAFHDNEETFLKKYLYEIARRHPYFY |
| | | | APELLFFAKRYKAAFTECCQAADKAACLLPKLDELRDEGKASSAKQRLKC |
| | | | ASLQKFGERAFKAWAVARLSQRFPKAEFAEVSKLVTDLTKVHTECCHGDL |
| | | | LECADDRADLAKYICENQDSISSKLKECCEKPLLEKSHCIAEVENDEMPA |
| | | | DLPSLAADFVESKDVCKNYAEAKDVFLGMFLYEYARRHPDYSVVLLLRLA |
| | | | KTYETTLEKCCAAADPHECYAKVFDEFKPLVEEPQNLIKQNCELFEQLGE |
| | | | YKFQNALLVRYTKKVPQVSTPTLVEVSRNLGKVGSKCCKHPEAKRMPCAE |
| | | | DYLSVVLNQLCVLHEKTPVSDRVTKCCTESLVNRRPCFSALDVDETYVPK |
| | | | EFNAETFTFHADICTLSEKERQIKKQTALVELVKHKPKATKEQLKAVMDD |
| | | | FAAFVEKCCKADDKETCFAEEGPHLVAASKAALGL |
| 226 | HALB | artificial | DAHKSEVAHRFKDLGEENFKALVLIAFAQYLQQCPFEDHVKLVNEVTEFA |
| | variant 4 | | KTCVADESAENCDKSLHTLFGDKLCTVATLRETYGEMADCCAKQEPERNE |
| | | | CFLQHKDDNPNLPRLVRPEVDVMCTAFHDNEETFLKKYLYEIARRHPYFY |
| | | | APELLFFAKRYKAAFTECCQAADKAACLLPKLDELRDEGKASSAKQRLKC |
| | | | ASLQKFGERAFKAWAVARLSQRFPKAEFAEVSKLVTDLTKVHTECCHGDL |
| | | | LECADDRADLAKYICENQDSISSKLKECCEKPLLEKSHCIAEVENDEMPA |
| | | | DLPSLAADFVESKDVCKNYAEAKDVFLGMFLYEYARRHPDYSVVLLLRLA |
| | | | KTYETTLEKCCAAADPHECYAKVFDEFKPLVEEPQNLIKQNCELFEQLGE |
| | | | YKFQNALLVRYTKKVPQVSTPTLVEVSRNLGKVGSKCCKHPEAKRMPCAE |
| | | | DYLSVVLNQLCVLHEKTPVSDRVTKCCTESLVNRRPCFSALGVDETYVPK |
| | | | EFNAETFTFHADICTLSEKERQIKKQTALVELVKHKPKATKEQLKAVMDK |
| | | | FAAFVEKCCKADDKETCFAEEGPKLVAASQAALGL |
| 227 | HALB | artificial | DAHKSEVAHRFKDLGEENFKALVLIAFAQYLQQCPFEDHVKLVNEVTEFA |
| | variant 5 | | KTCVADESAENCDKSLHTLFGDKLCTVATLRETYGEMADCCAKQEPERNE |
| | | | CFLQHKDDNPNLPRLVRPEVDVMCTAFHDNEETFLKKYLYEIARRHPYFY |
| | | | APELLFFAKRYKAAFTECCQAADKAACLLPKLDELRDEGKASSAKQRLKC |
| | | | ASLQKFGERAFKAWAVARLSQRFPKAEFAEVSKLVTDLTKVHTECCHGDL |
| | | | LECADDRADLAKYICENQDSISSKLKECCEKPLLEKSHCIAEVENDEMPA |
| | | | DLPSLAADFVESKDVCKNYAEAKDVFLGMFLYEYARRHPDYSVVLLLRLA |
| | | | KTYETTLEKCCAAADPHECYAKVFDEFKPLVEEPQNLIKQNCELFEQLGE |
| | | | YKFQNALLVRYTKKVPQVSTPTLVEVSRNLGKVGSKCCKHPEAKRMPCAE |
| | | | DYLSVVLNQLCVLHEKTPVSDRVTKCCTESLVNRRPCFSALDVDETYVPK |
| | | | EFNAETFTFHADICTLSEKERQIKKQTALVELVKHKPKATKEQLKAVMDK |
| | | | FAAFVEKCCKADDKETCFAEEGPKLVAASQAALGL |
| 228 | HALB | artificial | DAHKSEVAHRFKDLGEENFKALVLIAFAQYLQQCPFEDHVKLVNEVTEFA |
| | variant 6 | | KTCVADESAENCDKSLHTLFGDKLCTVATLRETYGEMADCCAKQEPERNE |
| | | | CFLQHKDDNPNLPRLVRPEVDVMCTAFHDNEETFLKKYLYEIARRHPYFY |
| | | | APELLFFAKRYKAAFTECCQAADKAACLLPKLDELRDEGKASSAKQRLKC |
| | | | ASLQKFGERAFKAWAVARLSQRFPKAEFAEVSKLVTDLTKVHTECCHGDL |
| | | | LECADDRADLAKYICENQDSISSKLKECCEKPLLEKSHCIAEVENDEMPA |
| | | | DLPSLAADFVESKDVCKNYAEAKDVFLGMFLYEYARRHPDYSVVLLLRLA |
| | | | KTYETTLEKCCAAADPHECYAKVFDEFKPLVEEPQNLIKQNCELFEQLGE |
| | | | YKFQNALLVRYTKKVPQVSTPTLVEVSRNLGKVGSKCCKHPEAKRMPCAE |
| | | | DYLSVVLNQLCVLHEKTPVSDRVTKCCTESLVNRRPCFSALEVDETYVPK |
| | | | EFNAETFTFHADICTLSEKERQIKKQTALVELVKHKPKATKEQLKAVMDK |
| | | | FAAFVEKCCKADDKETCFAEEGPHLVAASQAALGL |
| 229 | HALB | artificial | DAHKSEVAHRFKDLGEENFKALVLIAFAQYLQQCPFEDHVKLVNEVTEFA |
| | variant 7 | | KTCVADESAENCDKSLHTLFGDKLCTVATLRETYGEMADCCAKQEPERNE |
| | | | CFLQHKDDNPNLPRLVRPEVDVMCTAFHDNEETFLKKYLYEIARRHPYFY |
| | | | APELLFFAKRYKAAFTECCQAADKAACLLPKLDELRDEGKASSAKQRLKC |
| | | | ASLQKFGERAFKAWAVARLSQRFPKAEFAEVSKLVTDLTKVHTECCHGDL |
| | | | LECADDRADLAKYICENQDSISSKLKECCEKPLLEKSHCIAEVENDEMPA |
| | | | DLPSLAADFVESKDVCKNYAEAKDVFLGMFLYEYARRHPDYSVVLLLRLA |
| | | | KTYETTLEKCCAAADPHECYAKVFDEFKPLVEEPQNLIKQNCELFEQLGE |
| | | | YKFQNALLVRYTKKVPQVSTPTLVEVSRNLGKVGSKCCKHPEAKRMPCAE |
| | | | DYLSVVLNQLCVLHEKTPVSDRVTKCCTESLVNRRPCFSALEVDETYVPK |
| | | | EFNAETFTFHADICTLSEKERQIKKQTALVELVKHKPKATKEQLKAVMDD |
| | | | FAAFVEKCCKADDKETCFAEEGPHLVAASKAALGL |
| 230 | HALB | artificial | DAHKSEVAHRFKDLGEENFKALVLIAFAQYLQQCPFEDHVKLVNEVTEFA |
| | variant 8 | | KTCVADESAENCDKSLHTLFGDKLCTVATLRETYGEMADCCAKQEPERNE |
| | | | CFLQHKDDNPNLPRLVRPEVDVMCTAFHDNEETFLKKYLYEIARRHPYFY |
| | | | APELLFFAKRYKAAFTECCQAADKAACLLPKLDELRDEGKASSAKQRLKC |
| | | | ASLQKFGERAFKAWAVARLSQRFPKAEFAEVSKLVTDLTKVHTECCHGDL |
| | | | LECADDRADLAKYICENQDSISSKLKECCEKPLLEKSHCIAEVENDEMPA |
| | | | DLPSLAADFVESKDVCKNYAEAKDVFLGMFLYEYARRHPDYSVVLLLRLA |
| | | | KTYETTLEKCCAAADPHECYAKVFDEFKPLVEEPQNLIKQNCELFEQLGE |
| | | | YKFQNALLVRYTKKVPQVSTPTLVEVSRNLGKVGSKCCKHPEAKRMPCAE |
| | | | DYLSVVLNQLCVLHEKTPVSDRVTKCCTESLVNRRPCFSALEVDETYVPK |
| | | | EFNAETFTFHADICTLSEKERQIKKQTALVELVKHKPKATKEQLKAVMDK |
| | | | FAAFVEKCCKADDKETCFAEEGPKLVAASKAALGL |
| 231 | HALB | artificial | DAHKSEVAHRFKDLGEENFKALVLIAFAQYLQQCPFEDHVKLVNEVTEFA |
| | variant 9 | | KTCVADESAENCDKSLHTLFGDKLCTVATLRETYGEMADCCAKQEPERNE |
| | | | CFLQHKDDNPNLPRLVRPEVDVMCTAFHDNEETFLKKYLYEIARRHPYFY |
| | | | APELLFFAKRYKAAFTECCQAADKAACLLPKLDELRDEGKASSAKQRLKC |
| | | | ASLQKFGERAFKAWAVARLSQRFPKAEFAEVSKLVTDLTKVHTECCHGDL |
| | | | LECADDRADLAKYICENQDSISSKLKECCEKPLLEKSHCIAEVENDEMPA |
| | | | DLPSLAADFVESKDVCKNYAEAKDVFLGMFLYEYARRHPDYSVVLLLRLA |
| | | | KTYETTLEKCCAAADPHECYAKVFDEFKPLVEEPQNLIKQNCELFEQLGE |
| | | | YKFQNALLVRYTKKVPQVSTPTLVEVSRNLGKVGSKCCKHPEAKRMPCAE |
| | | | DYLSVVLNQLCVLHEKTPVSDRVTKCCTESLVNRRPCFSALDVDETYVPK |
| | | | EFNAETFTFHADICTLSEKERQIKKQTALVELVKHKPKATKEQLKAVMDD |
| | | | FAAFVEKCCKADDKETCFAEEGPKLVAASKAALGL |
| 232 | HALB | artificial | DAHKSEVAHRFKDLGEENFKALVLIAFAQYLQQSPFEDHVKLVNEVTEFA |
| | variant 10 | | KTCVADESAENCDKSLHTLFGDKLCTVATLRETYGEMADCCAKQEPERNE |
| | | | CFLQHKDDNPNLPRLVRPEVDVMCTAFHDNEETFLKKYLYEIARRHPYFY |
| | | | APELLFFAKRYKAAFTECCQAADKAACLLPKLDELRDEGKASSAKQRLKC |
| | | | ASLQKFGERAFKAWAVARLSQRFPKAEFAEVSKLVTDLTKVHTECCHGDL |
| | | | LECADDRADLAKYICENQDSISSKLKECCEKPLLEKSHCIAEVENDEMPA |
| | | | DLPSLAADFVESKDVCKNYAEAKDVFLGMFLYEYARRHPDYSVVLLLRLA |
| | | | KTYETTLEKCCAAADPHECYAKVFDEFKPLVEEPQNLIKQNCELFEQLGE |
| | | | YKFQNALLVRYTKKVPQVSTPTLVEVSRNLGKVGSKCCKHPEAKRMPCAE |
| | | | DYLSVVLNQLCVLHEKTPVSDRVTKCCTESLVNRRPCFSALEVDETYVPK |
| | | | EFNAETFTFHADICTLSEKERQIKKQTALVELVKHKPKATKEQLKAVMDD |
| | | | FAAFVEKCCKADDKETCFAEEGKKLVAASQAALGL |
| 233 | HALB | artificial | DAHKSEVAHRFKDLGEENFKALVLIAFAQYLQQSPFEDHVKLVNEVTEFA |
| | variant 11 | | KTCVADESAENCDKSLHTLFGDKLCTVATLRETYGEMADCCAKQEPERNE |
| | | | CFLQHKDDNPNLPRLVRPEVDVMCTAFHDNEETFLKKYLYEIARRHPYFY |
| | | | APELLFFAKRYKAAFTECCQAADKAACLLPKLDELRDEGKASSAKQRLKC |
| | | | ASLQKFGERAFKAWAVARLSQRFPKAEFAEVSKLVTDLTKVHTECCHGDL |
| | | | LECADDRADLAKYICENQDSISSKLKECCEKPLLEKSHCIAEVENDEMPA |
| | | | DLPSLAADFVESKDVCKNYAEAKDVFLGMFLYEYARRHPDYSVVLLLRLA |
| | | | KTYETTLEKCCAAADPHECYAKVFDEFKPLVEEPQNLIKQNCELFEQLGE |
| | | | YKFQNALLVRYTKKVPQVSTPTLVEVSRNLGKVGSKCCKHPEAKRMPCAE |
| | | | DYLSVVLNQLCVLHEKTPVSDRVTKCCTESLVNRRPCFSALEVDETYVPK |
| | | | EFNAGTFTFHADICTLSEKERQIKKQTALVELVKHKPKATKEQLKAAMDD |
| | | | FAAFVEKCCKADDKETCFAEEGKKLVAASQAALGL |
| 234 | HALB | artificial | DAHKSEVAHRFKDLGEENFKALVLIAFAQYLQQSPFEDHVKLVNEVTEFA |
| | variant 12 | | KTCVADESAENCDKSLHTLFGDKLCTVATLRETYGEMADCCAKQEPERNE |
| | | | CFLQHKDDNPNLPRLVRPEVDVMCTAFHDNEETFLKKYLYEIARRHPYFY |
| | | | APELLFFAKRYKAAFTECCQAADKAACLLPKLDELRDEGKASSAKQRLKC |
| | | | ASLQKFGERAFKAWAVARLSQRFPKAEFAEVSKLVTDLTKVHTECCHGDL |
| | | | LECADDRADLAKYICENQDSISSKLKECCEKPLLEKSHCIAEVENDEMPA |
| | | | DLPSLAADFVESKDVCKNYAEAKDVFLGMFLYEYARRHPDYSVVLLLRLA |
| | | | KTYETTLEKCCAAADPHECYAKVFDEFKPLVEEPQNLIKQNCELFEQLGE |
| | | | YKFQNALLVRYTKKVPQVSTPTLVEVSRNLGKVGSKCCKHPEAKRMPCAE |
| | | | DYLSVVLNQLCVLHEKTPVSDRVTKCCTESLVNRRPCFSALEVDETYVPK |
| | | | EFNAETFTFHADICTLSEKERQIKKQTALVELVKHKPKATKEQLKAVMDD |
| | | | FAAFVEKCCKADDKETCFAEEGPKLVAASQAALGL |
| 235 | HALB | artificial | DAHKSEVAHRFKDLGEENFKALVLIAFAQYLQQSPFEDHVKLVNEVTEFA |
| | variant 13 | | KTCVADESAENCDKSLHTLFGDKLCTVATLRETYGEMADCCAKQEPERNE |
| | | | CFLQHKDDNPNLPRLVRPEVDVMCTAFHDNEETFLKKYLYEIARRHPYFY |
| | | | APELLFFAKRYKAAFTECCQAADKAACLLPKLDELRDEGKASSAKQRLKC |
| | | | ASLQKFGERAFKAWAVARLSQRFPKAEFAEVSKLVTDLTKVHTECCHGDL |
| | | | LECADDRADLAKYICENQDSISSKLKECCEKPLLEKSHCIAEVENDEMPA |
| | | | DLPSLAADFVESKDVCKNYAEAKDVFLGMFLYEYARRHPDYSVVLLLRLA |
| | | | KTYETTLEKCCAAADPHECYAKVFDEFKPLVEEPQNLIKQNCELFEQLGE |
| | | | YKFQNALLVRYTKKVPQVSTPTLVEVSRNLGKVGSKCCKHPEAKRMPCAE |
| | | | DYLSVVLNQLCVLHEKTPVSDRVTKCCTESLVNRRPCFSALDVDETYVPK |
| | | | EFNAETFTFHADICTLSEKERQIKKQTALVELVKHKPKATKEQLKAVMDD |
| | | | FAAFVEKCCKADDKETCFAEEGPHLVAASKAALGL |
| 236 | HALB | artificial | DAHKSEVAHRFKDLGEENFKALVLIAFAQYLQQSPFEDHVKLVNEVTEFA |
| | variant 14 | | KTCVADESAENCDKSLHTLFGDKLCTVATLRETYGEMADCCAKQEPERNE |
| | | | CFLQHKDDNPNLPRLVRPEVDVMCTAFHDNEETFLKKYLYEIARRHPYFY |
| | | | APELLFFAKRYKAAFTECCQAADKAACLLPKLDELRDEGKASSAKQRLKC |
| | | | ASLQKFGERAFKAWAVARLSQRFPKAEFAEVSKLVTDLTKVHTECCHGDL |
| | | | LECADDRADLAKYICENQDSISSKLKECCEKPLLEKSHCIAEVENDEMPA |
| | | | DLPSLAADFVESKDVCKNYAEAKDVFLGMFLYEYARRHPDYSVVLLLRLA |
| | | | KTYETTLEKCCAAADPHECYAKVFDEFKPLVEEPQNLIKQNCELFEQLGE |
| | | | YKFQNALLVRYTKKVPQVSTPTLVEVSRNLGKVGSKCCKHPEAKRMPCAE |
| | | | DYLSVVLNQLCVLHEKTPVSDRVTKCCTESLVNRRPCFSALGVDETYVPK |
| | | | EFNAETFTFHADICTLSEKERQIKKQTALVELVKHKPKATKEQLKAVMDK |
| | | | FAAFVEKCCKADDKETCFAEEGPKLVAASQAALGL |
| 237 | HALB | artificial | DAHKSEVAHRFKDLGEENFKALVLIAFAQYLQQSPFEDHVKLVNEVTEFA |
| | variant 15 | | KTCVADESAENCDKSLHTLFGDKLCTVATLRETYGEMADCCAKQEPERNE |
| | | | CFLQHKDDNPNLPRLVRPEVDVMCTAFHDNEETFLKKYLYEIARRHPYFY |
| | | | APELLFFAKRYKAAFTECCQAADKAACLLPKLDELRDEGKASSAKQRLKC |
| | | | ASLQKFGERAFKAWAVARLSQRFPKAEFAEVSKLVTDLTKVHTECCHGDL |
| | | | LECADDRADLAKYICENQDSISSKLKECCEKPLLEKSHCIAEVENDEMPA |
| | | | DLPSLAADFVESKDVCKNYAEAKDVFLGMFLYEYARRHPDYSVVLLLRLA |
| | | | KTYETTLEKCCAAADPHECYAKVFDEFKPLVEEPQNLIKQNCELFEQLGE |
| | | | YKFQNALLVRYTKKVPQVSTPTLVEVSRNLGKVGSKCCKHPEAKRMPCAE |
| | | | DYLSVVLNQLCVLHEKTPVSDRVTKCCTESLVNRRPCFSALDVDETYVPK |
| | | | EFNAETFTFHADICTLSEKERQIKKQTALVELVKHKPKATKEQLKAVMDK |
| | | | FAAFVEKCCKADDKETCFAEEGPKLVAASQAALGL |
| 238 | HALB | artificial | DAHKSEVAHRFKDLGEENFKALVLIAFAQYLQQSPFEDHVKLVNEVTEFA |
| | variant 16 | | KTCVADESAENCDKSLHTLFGDKLCTVATLRETYGEMADCCAKQEPERNE |
| | | | CFLQHKDDNPNLPRLVRPEVDVMCTAFHDNEETFLKKYLYEIARRHPYFY |
| | | | APELLFFAKRYKAAFTECCQAADKAACLLPKLDELRDEGKASSAKQRLKC |
| | | | ASLQKFGERAFKAWAVARLSQRFPKAEFAEVSKLVTDLTKVHTECCHGDL |
| | | | LECADDRADLAKYICENQDSISSKLKECCEKPLLEKSHCIAEVENDEMPA |
| | | | DLPSLAADFVESKDVCKNYAEAKDVFLGMFLYEYARRHPDYSVVLLLRLA |
| | | | KTYETTLEKCCAAADPHECYAKVFDEFKPLVEEPQNLIKQNCELFEQLGE |
| | | | YKFQNALLVRYTKKVPQVSTPTLVEVSRNLGKVGSKCCKHPEAKRMPCAE |
| | | | DYLSVVLNQLCVLHEKTPVSDRVTKCCTESLVNRRPCFSALEVDETYVPK |
| | | | EFNAETFTFHADICTLSEKERQIKKQTALVELVKHKPKATKEQLKAVMDK |
| | | | FAAFVEKCCKADDKETCFAEEGPHLVAASQAALGL |
| 239 | HALB | artificial | DAHKSEVAHRFKDLGEENFKALVLIAFAQYLQQSPFEDHVKLVNEVTEFA |
| | variant 17 | | KTCVADESAENCDKSLHTLFGDKLCTVATLRETYGEMADCCAKQEPERNE |
| | | | CFLQHKDDNPNLPRLVRPEVDVMCTAFHDNEETFLKKYLYEIARRHPYFY |
| | | | APELLFFAKRYKAAFTECCQAADKAACLLPKLDELRDEGKASSAKQRLKC |
| | | | ASLQKFGERAFKAWAVARLSQRFPKAEFAEVSKLVTDLTKVHTECCHGDL |
| | | | LECADDRADLAKYICENQDSISSKLKECCEKPLLEKSHCIAEVENDEMPA |
| | | | DLPSLAADFVESKDVCKNYAEAKDVFLGMFLYEYARRHPDYSVVLLLRLA |
| | | | KTYETTLEKCCAAADPHECYAKVFDEFKPLVEEPQNLIKQNCELFEQLGE |
| | | | YKFQNALLVRYTKKVPQVSTPTLVEVSRNLGKVGSKCCKHPEAKRMPCAE |
| | | | DYLSVVLNQLCVLHEKTPVSDRVTKCCTESLVNRRPCFSALEVDETYVPK |
| | | | EFNAETFTFHADICTLSEKERQIKKQTALVELVKHKPKATKEQLKAVMDD |
| | | | FAAFVEKCCKADDKETCFAEEGPHLVAASKAALGL |
| 240 | HALB | artificial | DAHKSEVAHRFKDLGEENFKALVLIAFAQYLQQSPFEDHVKLVNEVTEFA |
| | variant 18 | | KTCVADESAENCDKSLHTLFGDKLCTVATLRETYGEMADCCAKQEPERNE |
| | | | CFLQHKDDNPNLPRLVRPEVDVMCTAFHDNEETFLKKYLYEIARRHPYFY |
| | | | APELLFFAKRYKAAFTECCQAADKAACLLPKLDELRDEGKASSAKQRLKC |
| | | | ASLQKFGERAFKAWAVARLSQRFPKAEFAEVSKLVTDLTKVHTECCHGDL |
| | | | LECADDRADLAKYICENQDSISSKLKECCEKPLLEKSHCIAEVENDEMPA |
| | | | DLPSLAADFVESKDVCKNYAEAKDVFLGMFLYEYARRHPDYSVVLLLRLA |
| | | | KTYETTLEKCCAAADPHECYAKVFDEFKPLVEEPQNLIKQNCELFEQLGE |
| | | | YKFQNALLVRYTKKVPQVSTPTLVEVSRNLGKVGSKCCKHPEAKRMPCAE |
| | | | DYLSVVLNQLCVLHEKTPVSDRVTKCCTESLVNRRPCFSALEVDETYVPK |
| | | | EFNAETFTFHADICTLSEKERQIKKQTALVELVKHKPKATKEQLKAVMDK |
| | | | FAAFVEKCCKADDKETCFAEEGPKLVAASKAALGL |
| 241 | HALB | artificial | DAHKSEVAHRFKDLGEENFKALVLIAFAQYLQQSPFEDHVKLVNEVTEFA |
| | variant 19 | | KTCVADESAENCDKSLHTLFGDKLCTVATLRETYGEMADCCAKQEPERNE |
| | | | CFLQHKDDNPNLPRLVRPEVDVMCTAFHDNEETFLKKYLYEIARRHPYFY |
| | | | APELLFFAKRYKAAFTECCQAADKAACLLPKLDELRDEGKASSAKQRLKC |
| | | | ASLQKFGERAFKAWAVARLSQRFPKAEFAEVSKLVTDLTKVHTECCHGDL |
| | | | LECADDRADLAKYICENQDSISSKLKECCEKPLLEKSHCIAEVENDEMPA |
| | | | DLPSLAADFVESKDVCKNYAEAKDVFLGMFLYEYARRHPDYSVVLLLRLA |
| | | | KTYETTLEKCCAAADPHECYAKVFDEFKPLVEEPQNLIKQNCELFEQLGE |
| | | | YKFQNALLVRYTKKVPQVSTPTLVEVSRNLGKVGSKCCKHPEAKRMPCAE |
| | | | DYLSVVLNQLCVLHEKTPVSDRVTKCCTESLVNRRPCFSALDVDETYVPK |
| | | | EFNAETFTFHADICTLSEKERQIKKQTALVELVKHKPKATKEQLKAVMDD |
| | | | FAAFVEKCCKADDKETCFAEEGPKLVAASKAALGL |
| 242 | HALB | artificial | DAHKSEVAHRFKDLGEENFKALVLIAFAQYLQQAPFEDHVKLVNEVTEFA |
| | variant 20 | | KTCVADESAENCDKSLHTLFGDKLCTVATLRETYGEMADCCAKQEPERNE |
| | | | CFLQHKDDNPNLPRLVRPEVDVMCTAFHDNEETFLKKYLYEIARRHPYFY |
| | | | APELLFFAKRYKAAFTECCQAADKAACLLPKLDELRDEGKASSAKQRLKC |
| | | | ASLQKFGERAFKAWAVARLSQRFPKAEFAEVSKLVTDLTKVHTECCHGDL |
| | | | LECADDRADLAKYICENQDSISSKLKECCEKPLLEKSHCIAEVENDEMPA |
| | | | DLPSLAADFVESKDVCKNYAEAKDVFLGMFLYEYARRHPDYSVVLLLRLA |
| | | | KTYETTLEKCCAAADPHECYAKVFDEFKPLVEEPQNLIKQNCELFEQLGE |
| | | | YKFQNALLVRYTKKVPQVSTPTLVEVSRNLGKVGSKCCKHPEAKRMPCAE |
| | | | DYLSVVLNQLCVLHEKTPVSDRVTKCCTESLVNRRPCFSALEVDETYVPK |
| | | | EFNAETFTFHADICTLSEKERQIKKQTALVELVKHKPKATKEQLKAVMDD |
| | | | FAAFVEKCCKADDKETCFAEEGKKLVAASQAALGL |
| 243 | HALB | artificial | DAHKSEVAHRFKDLGEENFKALVLIAFAQYLQQAPFEDHVKLVNEVTEFA |
| | variant 21 | | KTCVADESAENCDKSLHTLFGDKLCTVATLRETYGEMADCCAKQEPERNE |
| | | | CFLQHKDDNPNLPRLVRPEVDVMCTAFHDNEETFLKKYLYEIARRHPYFY |
| | | | APELLFFAKRYKAAFTECCQAADKAACLLPKLDELRDEGKASSAKQRLKC |
| | | | ASLQKFGERAFKAWAVARLSQRFPKAEFAEVSKLVTDLTKVHTECCHGDL |
| | | | LECADDRADLAKYICENQDSISSKLKECCEKPLLEKSHCIAEVENDEMPA |
| | | | DLPSLAADFVESKDVCKNYAEAKDVFLGMFLYEYARRHPDYSVVLLLRLA |
| | | | KTYETTLEKCCAAADPHECYAKVFDEFKPLVEEPQNLIKQNCELFEQLGE |
| | | | YKFQNALLVRYTKKVPQVSTPTLVEVSRNLGKVGSKCCKHPEAKRMPCAE |
| | | | DYLSVVLNQLCVLHEKTPVSDRVTKCCTESLVNRRPCFSALEVDETYVPK |
| | | | EFNAGTFTFHADICTLSEKERQIKKQTALVELVKHKPKATKEQLKAAMDD |
| | | | FAAFVEKCCKADDKETCFAEEGKKLVAASQAALGL |
| 244 | HALB | artificial | DAHKSEVAHRFKDLGEENFKALVLIAFAQYLQQAPFEDHVKLVNEVTEFA |
| | variant 22 | | KTCVADESAENCDKSLHTLFGDKLCTVATLRETYGEMADCCAKQEPERNE |
| | | | CFLQHKDDNPNLPRLVRPEVDVMCTAFHDNEETFLKKYLYEIARRHPYFY |
| | | | APELLFFAKRYKAAFTECCQAADKAACLLPKLDELRDEGKASSAKQRLKC |
| | | | ASLQKFGERAFKAWAVARLSQRFPKAEFAEVSKLVTDLTKVHTECCHGDL |
| | | | LECADDRADLAKYICENQDSISSKLKECCEKPLLEKSHCIAEVENDEMPA |
| | | | DLPSLAADFVESKDVCKNYAEAKDVFLGMFLYEYARRHPDYSVVLLLRLA |
| | | | KTYETTLEKCCAAADPHECYAKVFDEFKPLVEEPQNLIKQNCELFEQLGE |
| | | | YKFQNALLVRYTKKVPQVSTPTLVEVSRNLGKVGSKCCKHPEAKRMPCAE |
| | | | DYLSVVLNQLCVLHEKTPVSDRVTKCCTESLVNRRPCFSALEVDETYVPK |
| | | | EFNAETFTFHADICTLSEKERQIKKQTALVELVKHKPKATKEQLKAVMDD |
| | | | FAAFVEKCCKADDKETCFAEEGPKLVAASQAALGL |
| 245 | HALB | artificial | DAHKSEVAHRFKDLGEENFKALVLIAFAQYLQQAPFEDHVKLVNEVTEFA |
| | variant 23 | | KTCVADESAENCDKSLHTLFGDKLCTVATLRETYGEMADCCAKQEPERNE |
| | | | CFLQHKDDNPNLPRLVRPEVDVMCTAFHDNEETFLKKYLYEIARRHPYFY |
| | | | APELLFFAKRYKAAFTECCQAADKAACLLPKLDELRDEGKASSAKQRLKC |
| | | | ASLQKFGERAFKAWAVARLSQRFPKAEFAEVSKLVTDLTKVHTECCHGDL |
| | | | LECADDRADLAKYICENQDSISSKLKECCEKPLLEKSHCIAEVENDEMPA |
| | | | DLPSLAADFVESKDVCKNYAEAKDVFLGMFLYEYARRHPDYSVVLLLRLA |
| | | | KTYETTLEKCCAAADPHECYAKVFDEFKPLVEEPQNLIKQNCELFEQLGE |
| | | | YKFQNALLVRYTKKVPQVSTPTLVEVSRNLGKVGSKCCKHPEAKRMPCAE |
| | | | DYLSVVLNQLCVLHEKTPVSDRVTKCCTESLVNRRPCFSALDVDETYVPK |
| | | | EFNAETFTFHADICTLSEKERQIKKQTALVELVKHKPKATKEQLKAVMDD |
| | | | FAAFVEKCCKADDKETCFAEEGPHLVAASKAALGL |
| 246 | HALB | artificial | DAHKSEVAHRFKDLGEENFKALVLIAFAQYLQQAPFEDHVKLVNEVTEFA |
| | variant 24 | | KTCVADESAENCDKSLHTLFGDKLCTVATLRETYGEMADCCAKQEPERNE |
| | | | CFLQHKDDNPNLPRLVRPEVDVMCTAFHDNEETFLKKYLYEIARRHPYFY |
| | | | APELLFFAKRYKAAFTECCQAADKAACLLPKLDELRDEGKASSAKQRLKC |
| | | | ASLQKFGERAFKAWAVARLSQRFPKAEFAEVSKLVTDLTKVHTECCHGDL |
| | | | LECADDRADLAKYICENQDSISSKLKECCEKPLLEKSHCIAEVENDEMPA |
| | | | DLPSLAADFVESKDVCKNYAEAKDVFLGMFLYEYARRHPDYSVVLLLRLA |
| | | | KTYETTLEKCCAAADPHECYAKVFDEFKPLVEEPQNLIKQNCELFEQLGE |
| | | | YKFQNALLVRYTKKVPQVSTPTLVEVSRNLGKVGSKCCKHPEAKRMPCAE |
| | | | DYLSVVLNQLCVLHEKTPVSDRVTKCCTESLVNRRPCFSALGVDETYVPK |
| | | | EFNAETFTFHADICTLSEKERQIKKQTALVELVKHKPKATKEQLKAVMDK |
| | | | FAAFVEKCCKADDKETCFAEEGPKLVAASQAALGL |
| 247 | HALB | artificial | DAHKSEVAHRFKDLGEENFKALVLIAFAQYLQQAPFEDHVKLVNEVTEFA |
| | variant 25 | | KTCVADESAENCDKSLHTLFGDKLCTVATLRETYGEMADCCAKQEPERNE |
| | | | CFLQHKDDNPNLPRLVRPEVDVMCTAFHDNEETFLKKYLYEIARRHPYFY |
| | | | APELLFFAKRYKAAFTECCQAADKAACLLPKLDELRDEGKASSAKQRLKC |
| | | | ASLQKFGERAFKAWAVARLSQRFPKAEFAEVSKLVTDLTKVHTECCHGDL |
| | | | LECADDRADLAKYICENQDSISSKLKECCEKPLLEKSHCIAEVENDEMPA |
| | | | DLPSLAADFVESKDVCKNYAEAKDVFLGMFLYEYARRHPDYSVVLLLRLA |
| | | | KTYETTLEKCCAAADPHECYAKVFDEFKPLVEEPQNLIKQNCELFEQLGE |
| | | | YKFQNALLVRYTKKVPQVSTPTLVEVSRNLGKVGSKCCKHPEAKRMPCAE |
| | | | DYLSVVLNQLCVLHEKTPVSDRVTKCCTESLVNRRPCFSALDVDETYVPK |
| | | | EFNAETFTFHADICTLSEKERQIKKQTALVELVKHKPKATKEQLKAVMDK |
| | | | FAAFVEKCCKADDKETCFAEEGPKLVAASQAALGL |
| 248 | HALB | artificial | DAHKSEVAHRFKDLGEENFKALVLIAFAQYLQQAPFEDHVKLVNEVTEFA |
| | variant 26 | | KTCVADESAENCDKSLHTLFGDKLCTVATLRETYGEMADCCAKQEPERNE |
| | | | CFLQHKDDNPNLPRLVRPEVDVMCTAFHDNEETFLKKYLYEIARRHPYFY |
| | | | APELLFFAKRYKAAFTECCQAADKAACLLPKLDELRDEGKASSAKQRLKC |
| | | | ASLQKFGERAFKAWAVARLSQRFPKAEFAEVSKLVTDLTKVHTECCHGDL |
| | | | LECADDRADLAKYICENQDSISSKLKECCEKPLLEKSHCIAEVENDEMPA |
| | | | DLPSLAADFVESKDVCKNYAEAKDVFLGMFLYEYARRHPDYSVVLLLRLA |
| | | | KTYETTLEKCCAAADPHECYAKVFDEFKPLVEEPQNLIKQNCELFEQLGE |
| | | | YKFQNALLVRYTKKVPQVSTPTLVEVSRNLGKVGSKCCKHPEAKRMPCAE |
| | | | DYLSVVLNQLCVLHEKTPVSDRVTKCCTESLVNRRPCFSALEVDETYVPK |
| | | | EFNAETFTFHADICTLSEKERQIKKQTALVELVKHKPKATKEQLKAVMDK |
| | | | FAAFVEKCCKADDKETCFAEEGPHLVAASQAALGL |
| 249 | HALB | artificial | DAHKSEVAHRFKDLGEENFKALVLIAFAQYLQQAPFEDHVKLVNEVTEFA |
| | variant 27 | | KTCVADESAENCDKSLHTLFGDKLCTVATLRETYGEMADCCAKQEPERNE |
| | | | CFLQHKDDNPNLPRLVRPEVDVMCTAFHDNEETFLKKYLYEIARRHPYFY |
| | | | APELLFFAKRYKAAFTECCQAADKAACLLPKLDELRDEGKASSAKQRLKC |
| | | | ASLQKFGERAFKAWAVARLSQRFPKAEFAEVSKLVTDLTKVHTECCHGDL |
| | | | LECADDRADLAKYICENQDSISSKLKECCEKPLLEKSHCIAEVENDEMPA |
| | | | DLPSLAADFVESKDVCKNYAEAKDVFLGMFLYEYARRHPDYSVVLLLRLA |
| | | | KTYETTLEKCCAAADPHECYAKVFDEFKPLVEEPQNLIKQNCELFEQLGE |
| | | | YKFQNALLVRYTKKVPQVSTPTLVEVSRNLGKVGSKCCKHPEAKRMPCAE |
| | | | DYLSVVLNQLCVLHEKTPVSDRVTKCCTESLVNRRPCFSALEVDETYVPK |
| | | | EFNAETFTFHADICTLSEKERQIKKQTALVELVKHKPKATKEQLKAVMDD |
| | | | FAAFVEKCCKADDKETCFAEEGPHLVAASKAALGL |
| 250 | HALB | artificial | DAHKSEVAHRFKDLGEENFKALVLIAFAQYLQQAPFEDHVKLVNEVTEFA |
| | variant 28 | | KTCVADESAENCDKSLHTLFGDKLCTVATLRETYGEMADCCAKQEPERNE |
| | | | CFLQHKDDNPNLPRLVRPEVDVMCTAFHDNEETFLKKYLYEIARRHPYFY |
| | | | APELLFFAKRYKAAFTECCQAADKAACLLPKLDELRDEGKASSAKQRLKC |
| | | | ASLQKFGERAFKAWAVARLSQRFPKAEFAEVSKLVTDLTKVHTECCHGDL |
| | | | LECADDRADLAKYICENQDSISSKLKECCEKPLLEKSHCIAEVENDEMPA |
| | | | DLPSLAADFVESKDVCKNYAEAKDVFLGMFLYEYARRHPDYSVVLLLRLA |
| | | | KTYETTLEKCCAAADPHECYAKVFDEFKPLVEEPQNLIKQNCELFEQLGE |
| | | | YKFQNALLVRYTKKVPQVSTPTLVEVSRNLGKVGSKCCKHPEAKRMPCAE |
| | | | DYLSVVLNQLCVLHEKTPVSDRVTKCCTESLVNRRPCFSALEVDETYVPK |
| | | | EFNAETFTFHADICTLSEKERQIKKQTALVELVKHKPKATKEQLKAVMDK |
| | | | FAAFVEKCCKADDKETCFAEEGPKLVAASKAALGL |
| 251 | HALB | artificial | DAHKSEVAHRFKDLGEENFKALVLIAFAQYLQQAPFEDHVKLVNEVTEFA |
| | variant 29 | | KTCVADESAENCDKSLHTLFGDKLCTVATLRETYGEMADCCAKQEPERNE |
| | | | CFLQHKDDNPNLPRLVRPEVDVMCTAFHDNEETFLKKYLYEIARRHPYFY |
| | | | APELLFFAKRYKAAFTECCQAADKAACLLPKLDELRDEGKASSAKQRLKC |
| | | | ASLQKFGERAFKAWAVARLSQRFPKAEFAEVSKLVTDLTKVHTECCHGDL |
| | | | LECADDRADLAKYICENQDSISSKLKECCEKPLLEKSHCIAEVENDEMPA |
| | | | DLPSLAADFVESKDVCKNYAEAKDVFLGMFLYEYARRHPDYSVVLLLRLA |
| | | | KTYETTLEKCCAAADPHECYAKVFDEFKPLVEEPQNLIKQNCELFEQLGE |
| | | | YKFQNALLVRYTKKVPQVSTPTLVEVSRNLGKVGSKCCKHPEAKRMPCAE |
| | | | DYLSVVLNQLCVLHEKTPVSDRVTKCCTESLVNRRPCFSALDVDETYVPK |
| | | | EFNAETFTFHADICTLSEKERQIKKQTALVELVKHKPKATKEQLKAVMDD |
| | | | FAAFVEKCCKADDKETCFAEEGPKLVAASKAALGL |
| 252 | Cross body 1 HC | artificial | ASTKGPSVFPLAPSSKSTSGGTAALGCLVKDYFPEPVTVSWNSGALTSGV |
| | | | HTFPAVLQSSGLYSLSSVVTVPSSSLGTQTYICNVNHKPSNTKVDKKVEP |
| | | | KSCDKTHTCPPCPAPELLGGPSVFLFPPKPKDTLMTSRTPEVTCVVVDVS |
| | | | HEDPEVKFNWYVDGVEVHNAKTKPCEEQYGSTYRCVSVLTVLHQDWLNGK |
| | | | EYKCKVSNKALPAPIEKTISKAKGQPREPQVYTLPPSREEMTKNQVSLTC |
| | | | LVKGFYPSDIAVEWESNGQPENNYDTTPPVLDSDGSFFLYSDLTVDKSRW |
| | | | QQGNVFSCSVMHEALHNHYTQKSLSLSPGK |
| 253 | Cross body 1 LC | artificial | GQPKAAPSVTLFPPSSEELQANKATLVCLISDFYPGAVTVAWKADSSPVK |
| | | | AGVETTTPSKQSNNKYAASSYLSLTPEQWKSHRSYSCQVTHEGSTVEKTV |
| | | | APTECSDKTHTCPPCPAPELLGGPSVFLFPPKPKDTLMISRTPEVTCVVV |
| | | | DVSHEDPEVKFNWYVDGVEVHNAKTKPCEEQYGSTYRCVSVLTVLHQDWL |
| | | | NGKEYKCKVSNKALPAPTEKTTSKAKGQPREPQVYTLPPSRKEMTKNQVS |
| | | | LTCLVKGFYPSDIAVEWESNGQPENNYKTTPPVLKSDGSFFLYSKLTVDK |
| | | | SRWQQGNVFSCSVMHEALHNHYTQKSLSLSPGK |
| 254 | Cross body 2 HC | artificial | ASTKGPSVFPLAPCSRSTSESTAALGCLVKDYFPEPVTVSWNSGALTSGV |
| | | | HTFPAVLQSSGLYSLSSVVTVPSSNFGTQTYTCNVDHKPSNTKVDKTVEP |
| | | | KSSDKTHTCPPCPAPEAAGGPSVFLFPPKPKDTLMTSRTPEVTCVVVDVS |
| | | | HEDPEVKFNWYVDGVEVHNAKTKPREEQYNSTYRVVSVLTVLHQDWLNGK |
| | | | EYKCKVSNKALPAPIEKTISKAKGQPREPQVYTLPPSREEMTKNQVSLTC |
| | | | LVKGFYPSDIAVEWESNGQPENNYDTTPPVLDSDGSFFLYSDLTVDKSRW |
| | | | QQGNVFSCSVMHEALHNHYTQKSLSLSPGK |
| 255 | Cross body 2 LC | artificial | GQPKAAPSVTLFPPSSEELQANKATLVCLTSDFYPGAVTVAWKADSSPVK |
| | | | AGVETTTPSKQSNNKYAASSYLSLTPEQWKSHRSYSCQVTHEGSTVEKTV |
| | | | APTECSEPKSSDKTHTCPPCPAPEAAGGPSVFLFPPKPKDTLMTSRTPEV |
| | | | TCVVVDVSHEDPEVKFNWYVDGVEVHNAKTKPREEQYNSTYRVVSVLTVL |
| | | | HQDWLNGKEYKCKVSNKALPAPTEKTTSKAKGQPREPQVYTLPPSRKEMT |
| | | | KNQVSLTCLVKGFYPSDTAVEWESNGQPENNYKTTPPVLKSDGSFFLYSK |
| | | | LTVDKSRWQQGNVFSCSVMHEALHNHYTQKSLSLSPGK |
| 256 | Hetero-Fc binder Fc | artificial | DKTHTCPPCPAPELLGGPSVFLFPPKPKDTLMTSRTPEVTCVVVDVSHED |
| | | | PEVKFNWYVDGVEVHNAKTKPCEEQYGSTYRCVSVLTVLHQDWLNGKEYK |
| | | | CKVSNKALPAPIEKTISKAKGQPREPQVYTLPPSRKEMTKNQVSLTCLVK |
| | | | GFYPSDTAVEWESNGQPENNYKTTPPVLKSDGSFFLYSKLTVDKSRWQQG |
| | | | NVFSCSVMHEALHNHYTQKSLSLSPGK |
| 257 | Hetero-Fc partner | artificial | DKTHTCPPCPAPELLGGPSVFLFPPKPKDTLMTSRTPEVTCVVVDVSHED |
| | Fc | | PEVKFNWYVDGVEVHNAKTKPCEEQYGSTYRCVSVLTVLHQDWLNGKEYK |
| | | | CKVSNKALPAPIEKTISKAKGQPREPQVYTLPPSREEMTKNQVSLTCLVK |
| | | | GFYPSDTAVEWESNGQPENNYDTTPPVLDSDGSFFLYSDLTVDKSRWQQG |
| | | | NVFSCSVMHEALHNHYTQKSLSLSPGK |
| 258 | Maxi-body 1 target | artificial | EPKSSDKTHTCPPCPAPELLGGPSVFLFPPKPKDTLMISRTPEVTCVVVD |
| | Fc | | VSHEDPEVKFNWYVDGVEVHNAKTKPCEEQYGSTYRCVSVLTVLHQDWLN |
| | | | GKEYKCKVSNKALPAPIEKTISKAKGQPREPQVYTLPPSRKEMTKNQVSL |
| | | | TCLVKGFYPSDIAVEWESNGQPENNYKTTPPVLKSDGSFFLYSKLTVDKS |
| | | | RWQQGNVFSCSVMHEALHNHYTQKSLSLSPGK |
| 259 | Maxi-body 1 CD3 Fc | artificial | EPKSSDKTHTCPPCPAPELLGGPSVFLFPPKPKDTLMISRTPEVTCVVVD |
| | | | VSHEDPEVKFNWYVDGVEVHNAKTKPCEEQYGSTYRCVSVLTVLHQDWLN |
| | | | GKEYKCKVSNKALPAPIEKTISKAKGQPREPQVYTLPPSREEMTKNQVSL |
| | | | TCLVKGFYPSDIAVEWESNGQPENNYDTTPPVLDSDGSFFLYSDLTVDKS |
| | | | RWQQGNVFSCSVMHEALHNHYTQKSLSLSPGK |
| 260 | Maxi-body 2 target | artificial | EPKSSDKTHTCPPCPAPEAAGGPSVFLFPPKPKDTLMISRTPEVTCVVVD |
| | Fc | | VSHEDPEVKFNWYVDGVEVHNAKTKPREEQYNSTYRVVSVLTVLHQDWLN |
| | | | GKEYKCKVSNKALPAPIEKTISKAKGQPREPQVYTLPPSRKEMTKNQVSL |
| | | | TCLVKGFYPSDIAVEWESNGQPENNYKTTPPVLKSDGSFFLYSKLTVDKS |
| | | | RWQQGNVFSCSVMHEALHNHYTQKSLSLSPGK |
| 261 | Maxi-body 2 CD3 Fc | artificial | EPKSSDKTHTCPPCPAPEAAGGPSVFLFPPKPKDTLMISRTPEVTCVVVD |
| | | | VSHEDPEVKFNWYVDGVEVHNAKTKPREEQYNSTYRVVSVLTVLHQDWLN |
| | | | GKEYKCKVSNKALPAPIEKTISKAKGQPREPQVYTLPPSREEMTKNQVSL |
| | | | TCLVKGFYPSDIAVEWESNGQPENNYDTTPPVLDSDGSFFLYSDLTVDKS |
| | | | RWQQGNVFSCSVMHEALHNHYTQKSLSLSPGK |
| 262 | Mono Fc | artificial | APELLGGPSVFLFPPKPKDTLMISRTPEVTCVVVDVSHEDPEVKFNWYVD |
| | | | GVEVHNAKTKPREEQYNSTYRVVSVLTVLHQDWLNGKEYKCKVSNKALPA |
| | | | PIEKTISKAKGQPREPQVTTLPPSREEMTKNQVSLTCLVKGFYPSDIAVE |
| | | | WESNGQPENNYDTTPPVLDSDGSFFLYSDLTVDKSRWQQGNVFSCSVMHE |
| | | | ALHNHYTQKSLSLSPGK |
| 263 | Fc monomer-1 | artificial | DKTHTCPPCPAPELLGGPSVFLFPPKPKDTLMISRTPEVTCVVVDVSHED |
| | +c/-g | | PEVKFNWYVDGVEVHNAKTKPCEEQYGSTYRCVSVLTVLHQDWLNGKEYK |
| | | | CKVSNKALPAPIEKTISKAKGQPREPQVYTLPPSREEMTKNQVSLTCLVK |
| | | | GFYPSDIAVEWESNGQPENNYKTTPPVLDSDGSFFLYSKLTVDKSRWQQG |
| | | | NVFSCSVMHEALHNHYTQKSLSLSPGK |
| 264 | Fc monomer-2 | artificial | DKTHTCPPCPAPELLGGPSVFLFPPKPKDTLMISRTPEVTCVVVDVSHED |
| | +c/-g/delGK | | PEVKFNWYVDGVEVHNAKTKPCEEQYGSTYRCVSVLTVLHQDWLNGKEYK |
| | | | CKVSNKALPAPIEKTISKAKGQPREPQVYTLPPSREEMTKNQVSLTCLVK |
| | | | GFYPSDIAVEWESNGQPENNYKTTPPVLDSDGSFFLYSKLTVDKSRWQQG |
| | | | NVFSCSVMHEALHNHYTQKSLSLSP |
| 265 | Fc monomer-3 | artificial | DKTHTCPPCPAPELLGGPSVFLFPPKPKDTLMISRTPEVTCVVVDVSHED |
| | -c/+g | | PEVKFNWYVDGVEVHNAKTKPREEQYNSTYRVVSVLTVLHQDWLNGKEYK |
| | | | CKVSNKALPAPIEKTISKAKGQPREPQVYTLPPSREEMTKNQVSLTCLVK |
| | | | GFYPSDIAVEWESNGQPENNYKTTPPVLDSDGSFFLYSKLTVDKSRWQQG |
| | | | NVFSCSVMHEALHNHYTQKSLSLSPGK |
| 266 | Fc monomer-4 | artificial | DKTHTCPPCPAPELLGGPSVFLFPPKPKDTLMISRTPEVTCVVVDVSHED |
| | -c/+g/delGK | | PEVKFNWYVDGVEVHNAKTKPREEQYNSTYRVVSVLTVLHQDWLNGKEYK |
| | | | CKVSNKALPAPIEKTISKAKGQPREPQVYTLPPSREEMTKNQVSLTCLVK |
| | | | GFYPSDIAVEWESNGQPENNYKTTPPVLDSDGSFFLYSKLTVDKSRWQQG |
| | | | NVFSCSVMHEALHNHYTQKSLSLSP |
| 267 | Fc monomer-5 | artificial | DKTHTCPPCPAPELLGGPSVFLFPPKPKDTLMISRTPEVTCVVVDVSHED |
| | -c/-g | | PEVKFNWYVDGVEVHNAKTKPREEQYGSTYRVVSVLTVLHQDWLNGKEYK |
| | | | CKVSNKALPAPIEKTISKAKGQPREPQVYTLPPSREEMTKNQVSLTCLVK |
| | | | GFYPSDIAVEWESNGQPENNYKTTPPVLDSDGSFFLYSKLTVDKSRWQQG |
| | | | NVFSCSVMHEALHNHYTQKSLSLSPGK |
| 268 | Fc monomer-6 | artificial | DKTHTCPPCPAPELLGGPSVFLFPPKPKDTLMISRTPEVTCVVVDVSHED |
| | -c/-g/delGK | | PEVKFNWYVDGVEVHNAKTKPREEQYGSTYRVVSVLTVLHQDWLNGKEYK |
| | | | CKVSNKALPAPIEKTISKAKGQPREPQVYTLPPSREEMTKNQVSLTCLVK |
| | | | GFYPSDIAVEWESNGQPENNYKTTPPVLDSDGSFFLYSKLTVDKSRWQQG |
| | | | NVFSCSVMHEALHNHYTQKSLSLSP |
| 269 | Fc monomer-7 | artificial | DKTHTCPPCPAPELLGGPSVFLFPPKPKDTLMISRTPEVTCVVVDVSHED |
| | +c/+g | | PEVKFNWYVDGVEVHNAKTKPCEEQYNSTYRCVSVLTVLHQDWLNGKEYK |
| | | | CKVSNKALPAPIEKTISKAKGQPREPQVYTLPPSREEMTKNQVSLTCLVK |
| | | | GFYPSDIAVEWESNGQPENNYKTTPPVLDSDGSFFLYSKLTVDKSRWQQG |
| | | | NVFSCSVMHEALHNHYTQKSLSLSPGK |
| 270 | Fc monomer-8 | artificial | DKTHTCPPCPAPELLGGPSVFLFPPKPKDTLMISRTPEVTCVVVDVSHED |
| | +c/+g/delGK | | PEVKFNWYVDGVEVHNAKTKPCEEQYNSTYRCVSVLTVLHQDWLNGKEYK |
| | | | CKVSNKALPAPIEKTISKAKGQPREPQVYTLPPSREEMTKNQVSLTCLVK |
| | | | GFYPSDIAVEWESNGQPENNYKTTPPVLDSDGSFFLYSKLTVDKSRWQQG |
| | | | NVFSCSVMHEALHNHYTQKSLSLSP |
| 271 | scFc-1 | artificial | DKTHTCPPCPAPELLGGPSVFLFPPKPKDTLMISRTPEVTCVVVDVSHED |
| | | | PEVKFNWYVDGVEVHNAKTKPCEEQYGSTYRCVSVLTVLHQDWLNGKEYK |
| | | | CKVSNKALPAPIEKTISKAKGQPREPQVYTLPPSREEMTKNQVSLTCLVK |
| | | | GFYPSDIAVEWESNGQPENNYKTTPPVLDSDGSFFLYSKLTVDKSRWQQG |
| | | | NVFSCSVMHEALHNHYTQKSLSLSPGKGGGGSGGGGSGGGGSGGGGSGGG |
| | | | GSGGGGSDKTHTCPPCPAPELLGGPSVFLFPPKPKDTLMISRTPEVTCVV |
| | | | VDVSHEDPEVKFNWYVDGVEVHNAKTKPCEEQYGSTYRCVSVLTVLHQDW |
| | | | LNGKEYKCKVSNKALPAPIEKTISKAKGQPREPQVYTLPPSREEMTKNQV |
| | | | SLTCLVKGFYPSDIAVEWESNGQPENNYKTTPPVLDSDGSFFLYSKLTVD |
| | | | KSRWQQGNVFSCSVMHEALHNHYTQKSLSLSPGK |
| 272 | SCFc-2 | artificial | DKTHTCPPCPAPELLGGPSVFLFPPKPKDTLMISRTPEVTCVVVDVSHED |
| | | | PEVKFNWYVDGVEVHNAKTKPCEEQYGSTYRCVSVLTVLHQDWLNGKEYK |
| | | | CKVSNKALPAPIEKTISKAKGQPREPQVYTLPPSREEMTKNQVSLTCLVK |
| | | | GFYPSDIAVEWESNGQPENNYKTTPPVLDSDGSFFLYSKLTVDKSRWQQG |
| | | | NVFSCSVMHEALHNHYTQKSLSLSPGGGGSGGGGSGGGGSGGGGSGGGGS |
| | | | GGGGSDKTHTCPPCPAPELLGGPSVFLFPPKPKDTLMISRTPEVTCVVVD |
| | | | VSHEDPEVKFNWYVDGVEVHNAKTKPCEEQYGSTYRCVSVLTVLHQDWLN |
| | | | GKEYKCKVSNKALPAPIEKTISKAKGQPREPQVYTLPPSREEMTKNQVSL |
| | | | TCLVKGFYPSDIAVEWESNGQPENNYKTTPPVLDSDGSFFLYSKLTVDKS |
| | | | RWQQGNVFSCSVMHEALHNHYTQKSLSLSP |
| 273 | SCFC-3 | artificial | DKTHTCPPCPAPELLGGPSVFLFPPKPKDTLMISRTPEVTCVVVDVSHED |
| | | | PEVKFNWYVDGVEVHNAKTKPREEQYNSTYRVVSVLTVLHQDWLNGKEYK |
| | | | CKVSNKALPAPIEKTISKAKGQPREPQVYTLPPSREEMTKNQVSLTCLVK |
| | | | GEYPSDIAVEWESNGQPENNYKTTPPVLDSDGSFFLYSKLTVDKSRWQQG |
| | | | NVFSCSVMHEALHNHYTQKSLSLSPGKGGGGSGGGGSGGGGSGGGGSGGG |
| | | | GSGGGGSDKTHTCPPCPAPELLGGPSVFLFPPKPKDTLMISRTPEVTCVV |
| | | | VDVSHEDPEVKFNWYVDGVEVHNAKTKPREEQYNSTYRVVSVLTVLHQDW |
| | | | LNGKEYKCKVSNKALPAPIEKTISKAKGQPREPQVYTLPPSREEMTKNQV |
| | | | SLTCLVKGFYPSDIAVEWESNGQPENNYKTTPPVLDSDGSFFLYSKLTVD |
| | | | KSRWQQGNVFSCSVMHEALHNHYTQKSLSLSPGK |
| 274 | ScFc-4 | artificial | DKTHTCPPCPAPELLGGPSVFLFPPKPKDTLMISRTPEVTCVVVDVSHED |
| | | | PEVKFNWYVDGVEVHNAKTKPREEQYNSTYRVVSVLTVLHQDWLNGKEYK |
| | | | CKVSNKALPAPIEKTISKAKGQPREPQVYTLPPSREEMTKNQVSLTCLVK |
| | | | GFYPSDIAVEWESNGQPENNYKTTPPVLDSDGSFFLYSKLTVDKSRWQQG |
| | | | NVFSCSVMHEALHNHYTQKSLSLSPGGGGSGGGGSGGGGSGGGGSGGGGS |
| | | | GGGGSDKTHTCPPCPAPELLGGPSVFLFPPKPKDTLMISRTPEVTCVVVD |
| | | | VSHEDPEVKFNWYVDGVEVHNAKTKPREEQYNSTYRVVSVLTVLHQDWLN |
| | | | GKEYKCKVSNKALPAPIEKTISKAKGQPREPQVYTLPPSREEMTKNQVSL |
| | | | TCLVKGFYPSDIAVEWESNGQPENNYKTTPPVLDSDGSFFLYSKLTVDKS |
| | | | RWQQGNVFSCSVMHEALHNHYTQKSLSLSP |
| 275 | SCFc-5 | artificial | DKTHTCPPCPAPELLGGPSVFLFPPKPKDTLMISRTPEVTCVVVDVSHED |
| | | | PEVKFNWYVDGVEVHNAKTKPREEQYGSTYRVVSVLTVLHQDWLNGKEYK |
| | | | CKVSNKALPAPIEKTISKAKGQPREPQVYTLPPSREEMTKNQVSLTCLVK |
| | | | GFYPSDIAVEWESNGQPENNYKTTPPVLDSDGSFFLYSKLTVDKSRWQQG |
| | | | NVFSCSVMHEALHNHYTQKSLSLSPGKGGGGSGGGGSGGGGSGGGGSGGG |
| | | | GSGGGGSDKTHTCPPCPAPELLGGPSVFLFPPKPKDTLMISRTPEVTCVV |
| | | | VDVSHEDPEVKFNWYVDGVEVHNAKTKPREEQYGSTYRVVSVLTVLHQDW |
| | | | LNGKEYKCKVSNKALPAPIEKTISKAKGQPREPQVYTLPPSREEMTKNQV |
| | | | SLTCLVKGFYPSDIAVEWESNGQPENNYKTTPPVLDSDGSFFLYSKLTVD |
| | | | KSRWQQGNVFSCSVMHEALHNHYTQKSLSLSPGK |
| 276 | scFc-6 | artificial | DKTHTCPPCPAPELLGGPSVFLFPPKPKDTLMISRTPEVTCVVVDVSHED |
| | | | PEVKFNWYVDGVEVHNAKTKPREEQYGSTYRVVSVLTVLHQDWLNGKEYK |
| | | | CKVSNKALPAPIEKTISKAKGQPREPQVYTLPPSREEMTKNQVSLTCLVK |
| | | | GFYPSDIAVEWESNGQPENNYKTTPPVLDSDGSFFLYSKLTVDKSRWQQG |
| | | | NVFSCSVMHEALHNHYTOKSLSLSPGGGGSGGGGSGGGGSGGGGSGGGGS |
| | | | GGGGSDKTHTCPPCPAPELLGGPSVFLFPPKPKDTLMISRTPEVTCVVVD |
| | | | VSHEDPEVKFNWYVDGVEVHNAKTKPREEQYGSTYRVVSVLTVLHQDWLN |
| | | | GKEYKCKVSNKALPAPIEKTISKAKGQPREPQVYTLPPSREEMTKNQVSL |
| | | | TCLVKGFYPSDIAVEWESNGQPENNYKTTPPVLDSDGSFFLYSKLTVDKS |
| | | | RWQQGNVFSCSVMHEALHNHYTQKSLSLSP |
| 277 | scFc-7 | artificial | DKTHTCPPCPAPELLGGPSVFLFPPKPKDTLMISRTPEVTCVVVDVSHED |
| | | | PEVKFNWYVDGVEVHNAKTKPCEEQYNSTYRCVSVLTVLHQDWLNGKEYK |
| | | | CKVSNKALPAPIEKTISKAKGQPREPQVYTLPPSREEMTKNQVSLTCLVK |
| | | | GFYPSDIAVEWESNGQPENNYKTTPPVLDSDGSFFLYSKLTVDKSRWQQG |
| | | | NVFSCSVMHEALHNHYTQKSLSLSPGKGGGGSGGGGSGGGGSGGGGSGGG |
| | | | GSGGGGSDKTHTCPPCPAPELLGGPSVFLFPPKPKDTLMISRTPEVTCVV |
| | | | VDVSHEDPEVKFNWYVDGVEVHNAKTKPCEEQYNSTYRCVSVLTVLHQDW |
| | | | LNGKEYKCKVSNKALPAPIEKTISKAKGQPREPQVYTLPPSREEMTKNQV |
| | | | SLTCLVKGFYPSDIAVEWESNGQPENNYKTTPPVLDSDGSFFLYSKLTVD |
| | | | KSRWQQGNVFSCSVMHEALHNHYTQKSLSLSPGK |
| 278 | scFc-8 | artificial | DKTHTCPPCPAPELLGGPSVFLFPPKPKDTLMISRTPEVTCVVVDVSHED |
| | | | PEVKFNWYVDGVEVHNAKTKPCEEQYNSTYRCVSVLTVLHQDWLNGKEYK |
| | | | CKVSNKALPAPIEKTISKAKGQPREPQVYTLPPSREEMTKNQVSLTCLVK |
| | | | GFYPSDIAVEWESNGQPENNYKTTPPVLDSDGSFFLYSKLTVDKSRWQQG |
| | | | NVFSCSVMHEALHNHYTQKSLSLSPGGGGSGGGGSGGGGSGGGGSGGGGS |
| | | | GGGGSDKTHTCPPCPAPELLGGPSVFLFPPKPKDTLMISRTPEVTCWVD |
| | | | VSHEDPEVKFNWYVDGVEVHNAKTKPCEEQYNSTYRCVSVLTVLHQDWLN |
| | | | GKEYKCKVSNKALPAPIEKTISKAKGQPREPQVYTLPPSREEMTKNQVSL |
| | | | TCLVKGFYPSDIAVEWESNGQPENNYKTTPPVLDSDGSFFLYSKLTVDKS |
| | | | RWQQGNVFSCSVMHEALHNHYTQKSLSLSP |
| 279 | 5x his-tag | artificial | HHHHH |
| 280 | 6x his-tag | artificial | HHHHHH |
| 281 | CL-1 x I2C | bispecific | QVQLVQSGAEVKKPGASVKVSCKASGYTFTGYYMHWVRQAPGQCLEWMGW |
| | | molecule | INPNSGGTKYAQKFQGRVTMTRDTSISTAYMELSRLRSDDTAVYYCARDR |
| | | | ITVAGTYYYYGMDVWGQGTTVTVSSGGGGSGGGGSGGGGSDIQMTQSPSS |
| | | | VSASVGDRVTITCRASQGVNNWLAWYQQKPGKAPKLLIYTASSLQSGVPS |
| | | | RFSGSGSGTDFTLTIRSLQPEDFATYYCQQANSFPITFGCGTRLEIKSGG |
| | | | GGSEVQLVESGGGLVQPGGSLKLSCAASGFTFNKYAMNWVRQAPGKGLEW |
| | | | VARIRSKYNNYATYYADSVKDRFTISRDDSKNTAYLQMNNLKTEDTAVYY |
| | | | CVRHGNFGNSYISYWAYWGQGTLVTVSSGGGGSGGGGSGGGGSQTVVTQE |
| | | | PSLTVSPGGTVTLTCGSSTGAVTSGNYPNWVQQKPGQAPRGLIGGTKFLA |
| | | | PGTPARFSGSLLGGKAALTLSGVQPEDEAEYYCVLWYSNRWVFGGGTKLT |
| | | | VL |
| 282 | CL-2 x I2C | bispecific | QVQMVQSGAEVKKHGASVKVSCKASGYTFTGYYMHWVRQAPGQCLEWMGW |
| | | molecule | INPNSGGTKYAQKFQGRVTMTRDTSISTAYMELSRLRSDDTAVYYCARDR |
| | | | ITVAGTYYYYGMDVWGQGTTVTVSSGGGGSGGGGSGGGGSDIQMTOSPSS |
| | | | VSASVGDRVTITCRASQGVNNWLAWYQQKPGKAPKLLIYTASSLQSGVPS |
| | | | RFSGSGSGTDFTLTIRSLQPEDFATYYCQQANSFPITFGCGTRLEIKSGG |
| | | | GGSEVQLVESGGGLVQPGGSLKLSCAASGFTFNKYAMNWVRQAPGKGLEW |
| | | | VARIRSKYNNYATYYADSVKDRFTISRDDSKNTAYLQMNNLKTEDTAVYY |
| | | | CVRHGNFGNSYISYWAYWGQGTLVTVSSGGGGSGGGGSGGGGSQTVVTQE |
| | | | PSLTVSPGGTVTLTCGSSTGAVTSGNYPNWVQQKPGQAPRGLIGGTKFLA |
| | | | PGTPARFSGSLLGGKAALTLSGVQPEDEAEYYCVLWYSNRWVFGGGTKLT |
| | | | VL |
| 283 | CL-1 x I2C-6His | bispecific | QVQLVQSGAEVKKPGASVKVSCKASGYTFTGYYMHWVRQAPGQCLEWMGW |
| | | molecule-his | INPNSGGTKYAQKFQGRVTMTRDTSISTAYMELSRLRSDDTAVYYCARDR |
| | | tag | ITVAGTYYYYGMDVWGQGTTVTVSSGGGGSGGGGSGGGGSDIQMTQSPSS |
| | | | VSASVGDRVTITCRASQGVNNWLAWYQQKPGKAPKLLIYTASSLQSGVPS |
| | | | RFSGSGSGTDFTLTIRSLQPEDFATYYCQQANSFPITFGCGTRLEIKSGG |
| | | | GGSEVQLVESGGGLVQPGGSLKLSCAASGFTFNKYAMNWVRQAPGKGLEW |
| | | | VARIRSKYNNYATYYADSVKDRFTISRDDSKNTAYLOMNNLKTEDTAVYY |
| | | | CVRHGNFGNSYISYWAYWGQGTLVTVSSGGGGSGGGGSGGGGSQTVVTQE |
| | | | PSLTVSPGGTVTLTCGSSTGAVTSGNYPNWVQQKPGQAPRGLIGGTKFLA |
| | | | PGTPARFSGSLLGGKAALTLSGVQPEDEAEYYCVLWYSNRWVFGGGTKLT |
| | | | VLHHHHHH |
| 284 | CL-2 x I2C-6His | bispecific | QVQMVQSGAEVKKHGASVKVSCKASGYTFTGYYMHWVRQAPGQCLEWMGW |
| | | molecule- | INPNSGGTKYAQKFQGRVTMTRDTSISTAYMELSRLRSDDTAVYYCARDR |
| | | his tag | ITVAGTYYYYGMDVWGQGTTVTVSSGGGGSGGGGSGGGGSDIQMTQSPSS |
| | | | VSASVGDRVTITCRASQGVNNWLAWYQQKPGKAPKLLIYTASSLQSGVPS |
| | | | RFSGSGSGTDFTLTIRSLQPEDFATYYCQQANSFPITFGCGTRLEIKSGG |
| | | | GGSEVQLVESGGGLVQPGGSLKLSCAASGFTFNKYAMNWVRQAPGKGLEW |
| | | | VARIRSKYNNYATYYADSVKDRFTISRDDSKNTAYLQMNNLKTEDTAVYY |
| | | | CVRHGNFGNSYISYWAYWGQGTLVTVSSGGGGSGGGGSGGGGSQTVVTQE |
| | | | PSLTVSPGGTVTLTCGSSTGAVTSGNYPNWVQQKPGQAPRGLIGGTKFLA |
| | | | PGTPARFSGSLLGGKAALTLSGVQPEDEAEYYCVLWYSNRWVFGGGTKLT |
| | | | VLHHHHHH |
| 285 | AU1 epitope | artificial | DTYRYI |
| 286 | AU5 epitope | artificial | TDFYLK |
| 287 | T-7 tag | artificial | MASMTGGQQMG |
| 288 | V-5 tag | artificial | GKPIPNPLLGLDST |
| 289 | B-tag | artificial | QYPALT |
| 290 | E2 epitope | artificial | SSTSSDFRDR |
| 291 | FLAG tag | artificial | DYKDDDK |
| 292 | Glu-Glu tag 1 | artificial | EYMPME |
| 293 | Glu-Glu tag 2 | artificial | EFMPME |
| 294 | Histidine affinity | artificial | KDHL1HNVHKEFHAHAHNK |
| | tag | | |
| 295 | HSV epitope | artificial | QPELAPED |
| 296 | KT3 epitope | artificial | KPPTPPPEPET |
| 297 | Myc epitope | artificial | CEQKLISEEDL |
| 298 | 7x his-tag | artificial | HHHHHHH |
| 299 | 8x his-tag | artificial | HHHHHHHH |
| 300 | S1 tag | artificial | NANNPDWDF |
| 301 | S-tag | artificial | KETAAAKFERQHMDS |
| 302 | Strep-tag 1 | artificial | WSHPQFEK |
| 303 | Strep-tag 2 | artificial | AWAHPQPGG |
| 304 | Universal tag | artificial | HTTPHH |
| 305 | VSV-G | artificial | YTDIEMNRLGK |
| 306 | Protein C | artificial | EDQVDPRLIDGK |
| 307 | CD19XCD3 BISPECIFIC | artificial | DIQLTQSPASLAVSLGQRATISCKASQSVDYDGDSYLNWYQQIPGQPPKL |
| | SINGLE CHAIN | | LIYDASNLVSGIPPRFSGSGSGTDFTLNIHPVEKVDAATYHCQQSTEDPW |
| | ANTIBODY | | TFGGGTKLEIKGGGGSGGGGSGGGGSQVQLQQSGAELVRPGSSVKISCKA |
| | | | SGYAFSSYWMNWVKQRPGQGLEWIGQIWPGDGDTNYNGKFKGKATLTADE |
| | | | SSSTAYMQLSSLASEDSAVYFCARRETTTVGRYYYAMDYWGQGTTVTVSS |
| | | | GGGGSDIKLQQSGAELARPGASVKMSCKTSGYTFTRYTMHWVKQRPGQGL |
| | | | EWIGYINPSRGYTNYNQKFKDKATLTTDKSSSTAYMQLSSLTSEDSAVYY |
| | | | CARYYDDHYCLDYWGQGTTLTVSSVEGGSGGSGGSGGSGGVDDIQLTQSP |
| | | | AIMSASPGEKVTMTCRASSSVSYMNWYQQKSGTSPKRWIYDTSKVASGVP |
| | | | YRFSGSGSGTSYSLTISSMEAEDAATYYCQQWSSNPLTFGAGTKLELK |
| 308 | VH ANTI CD19 | artificial | QVQLQQSGAELVRPGSSVKISCKASGYAFSSYWMNWVKQRPGQGLEWIGQ |
| | | | IWPGDGDTNYNGKFKGKATLTADESSSTAYMQLSSLASEDSAVYFCARRE |
| | | | TTTVGRYYYAMDYWGQGTTVTVSS |
| 309 | VL ANTI CD19 | artificial | DIQLTQSPASLAVSLGQRATISCKASQSVDYDGDSYLNWYQQIPGQPPKL |
| | | | LIYDASNLVSGIPPRFSGSGSGTDFTLNIHPVEKVDAATYHCQQSTEDPW |
| | | | TEGGGTKLEIK |
| 310 | CD19 CDR-H1 | artificial | SYWMN |
| 311 | CD19 CDR-H1 | artificial | GYAFSSYWMN |
| 312 | CD19 CDR-H2 | artificial | QIWPGDGDTNYNGKFKG |
| 313 | CD19 CDR-H3 | artificial | RETTTVGRYYYAMDY |
| 314 | CD19 CDR-L1 | artificial | KASQSVDYDGDSYLN |
| 315 | CD19 CDR-L2 | artificial | DASNLVS |
| 316 | CD19 CDR-L3 | artificial | QQSTEDPWT |
| 317 | CD33 CDR-L1 | artificial | KSSQSVLDSSTNKNSLA |
| 318 | CD33 CDR-L2 | artificial | WASTRES |
| 319 | CD33 CDR-L3 | artificial | QQSAHFPIT |
| 320 | CD33 CDR-L1 | artificial | KSSQSVLDSSKNKNSLA |
| 321 | CD33 CDR-L2 | artificial | WASTRE |
| 322 | CD33 CDR-L1 | artificial | KSSQSVLDSSNNKNSLA |
| 323 | CD33 CDR-H1 | ARTIFICIAL | NYGMN |
| 324 | CD33 CDR-H2 | artificial | WINTYTGEPTYADKFQG |
| 325 | CD33 CDR-H3 | artificial | WSWSDGYYVYFDY |
| 326 | CD33 CDR-H2 | artificial | WINTYTGEPTYADDFKG |
| 327 | CD33 CDR-H2 | artificial | WINTYTGETNYADKFQG |
| 328 | CD33VL REGION | artificial | DIVMTQSPDSLTVSLGERTTINCKSSQSVLDSSTNKNSLAWYQQKPGQPP |
| | | | KLLLSWASTRESGIPDRFSGSGSGTDFTLTIDSPQPEDSATYYCQQSAHF |
| | | | PITFGQGTRLEIK |
| 329 | CD33VL REGION | artificial | DIVMTQSPDSLTVSLGERTTINCKSSQSVLDSSKNKNSLAWYQQKPGQPP |
| | | | KLLLSWASTRESGIPDRFSGSGSGTDFTLTIDSLQPEDSATYYCQQSAHF |
| | | | PITFGQGTRLEIK |
| 330 | CD33VL REGION | artificial | DIVMTQSPDSMTVSLGERTTINCKSSQSVLDSSTNKNSLAWYQQKPGQPP |
| | | | KLLLSWASTRESGIPDRFSGSGSGTDFTLTIDSLQPEDSATYYCQQSAHF |
| | | | PITFGQGTRLDIK |
| 331 | CD33VL REGION | artificial | DIVMTQSPDSLSVSLGERTTINCKSSQSVLDSSTNKNSLAWYQQKPGQPP |
| | | | KLLLSWASTRESGIPDRFSGSGSGTDFTLTIDSLQPEDSATYYCQQSAHF |
| | | | PITFGQGTRLEIK |
| 332 | CD33VL REGION | artificial | DIVMTQSPDSLTVSLGERTTINCKSSQSVLDSSNNKNSLAWYQQKPGQPP |
| | | | KLLLSWASTRESGIPDRFSGSGSGTDFTLTIDGLQPEDSATYYCQQSAHF |
| | | | PITFGQGTRLEIK |
| 333 | CD33VH REGION | artificial | QVQLVQSGAEVKKPGESVKVSCKASGYTFTNYGMNWVKQAPGQGLEWMGW |
| | | | INTYTGEPTYADKFQGRVTMTTDTSTSTAYMEIRNLGGDDTAVYYCARWS |
| | | | WSDGYYVYFDYWGQGTSVTVSS |
| 334 | CD33VH | artificial | QVQLVQSGAEVKKPGESVKVSCKASGYTFTNYGMNWVRQAPGQGLEWMGW |
| | | | INTYTGEPTYADDFKGRVTMSSDTSTSTAYLEINSLRSDDTAIYYCARWS |
| | | | WSDGYYVYFDYWGQGTTVTVSS |
| 335 | CD33VH | artificial | QVQLVQSGAEVKKPGESVKVSCKASGYTFTNYGMNWVKQAPGQGLKWMGW |
| | | | INTYTGEPTYADDFKGRVTMTTDTSTSTAYMEIRNLRNDDTAVYYCARWS |
| | | | WSDGYYVYFDYWGQGTTVTVSS |
| 336 | CD33VH | artificial | QVQLVQSGAEVKKPGESVKVSCKASGYTFTNYGMNWVKQAPGQGLKWMGW |
| | | | INTYTGEPTYADDFKGRVTMTTDTSTSTAYMEIRNLRNDDTAVYYCARWS |
| | | | WSDGYYVYFDYWGQGTTVTVSS |
| 337 | CD33VH | artificial | QVQLVQSGAEVKKPGESVKVSCKASGYTFTNYGMNWVKQAPGQGLKWMGW |
| | | | INTYTGEPTYADDFKGRVTMTSDTSTSTAYMEISSLRSDDTAVYYCARWS |
| | | | WSDGYYVYFDYWGQGTTVTVSS |
| 338 | CD33VH | artificial | QVQLVQSGAEVKKPGESVKVSCKASGYTFTNYGMNWVKQAPGQGLEWMGW |
| | | | INTYTGETNYADKFQGRVTFTSDTSTSTAYMELRNLKSDDTAVYYCARWS |
| | | | WSDGYYVYFDYWGQGTTVTVSS |
| 339 | CD33VH | artificial | QVQLVQSGAEVKKPGESVKVSCKASGYTFTNYGMNWVKQAPGQGLEWMGW |
| | | | INTYTGEPTYADKFQGRVTMTTDTSTSTAYMEIRNLRSDDTAVYYCARWS |
| | | | WSDGYYVYFDYWGQGTTVTVSS |
| 340 | CD33 UNIPROT ENTRY | human | MPLLLLLPLLWAGALAMDPNFWLQVQESVTVQEGLCVLVPCTFFHPIPYY |
| | P20138 | | DKNSPVHGYWFREGAIISRDSPVATNKLDQEVQEETQGRFRLLGDPSRNN |
| | | | CSLSIVDARRRDNGSYFFRMERGSTKYSYKSPQLSVHVTDLTHRPKILIP |
| | | | GTLEPGHSKNLTCSVSWACEQGTPPIFSWLSAAPTSLGPRTTHSSVLIIT |
| | | | PRPQDHGTNLTCQVKFAGAGVTTERTIQLNVTYVPQNPTTGIFPGDGSGK |
| | | | QETRAGVVHGAIGGAGVTALLALCLCLIFFIVKTHRRKAARTAVGRNDTH |
| | | | PTTGSASPKHQKKSKLHGPTETSSCSGAAPTVEMDEELHYASLNFHGMNP |
| | | | SKDTSTEYSEVRTQ |
| 341 | Flt3 VH-CDR1 | artificial | NARMGVS |
| 342 | Flt3 VH-CDR2 | artificial | HIFSNAEKSYRTSLKS |
| 343 | Flt3 VH-CDR3 | artificial | IPGYGGNGDYHYYGMDV |
| 344 | Flt3 VL-CDR1 | artificial | RASQGIRNDLG |
| 345 | Flt3 VL-CDR2 | artificial | ASSTLQS |
| 346 | Flt3 VL-CDR3 | artificial | LQHNNFPWT |
| 347 | Flt3 VH region | artificial | QVTLKESGPVLVKPTETLTLTCTVSGFSLINARMGVSWIRQPPGKALEWL |
| | | | AHIFSNAEKSYRTSLKSRLTISKDTSKSQVVLTMTNMDPVDTATYYCARI |
| | | | PGYGGNGDYHYYGMDVWGQGTTVTVSS |
| 348 | Flt3 VL region | artificial | DIQMTQSPSSLSASLGDRVTITCRASQGIRNDLGWYQQKPGKAPKRLIYA |
| | | | SSTLQSGVPSRFSGSGSGTEFTLTISSLQPEDFATYYCLQHNNFPWTFGQ |
| | | | GTKVEIK |
| 349 | second domain which | artificial | QVTLKESGPVLVKPTETLTLTCTVSGFSLINARMGVSWIRQPPGKALEWL |
| | binds to FLT3 | | AHIFSNAEKSYRTSLKSRLTISKDTSKSQVVLTMTNMDPVDTATYYCARI |
| | comprises a | | PGYGGNGDYHYYGMDVWGQGTTVTVSSGGGGSGGGGSGGGGSDIQMTQSP |
| | polypeptide | | SSLSASLGDRVTITCRASQGIRNDLGWYQQKPGKAPKRLIYASSTLQSGV |
| | | | PSRFSGSGSGTEFTLTISSLQPEDFATYYCLQHNNFPWTFGQGTKVEIK |
| 350 | Antibody construct | artificial | QVTLKESGPVLVKPTETLTLTCTVSGFSLINARMGVSWIRQPPGKALEWL |
| | binding to CD3 and | | AHIFSNAEKSYRTSLKSRLTISKDTSKSQVVLTMTNMDPVDTATYYCARI |
| | FLT3 | | PGYGGNGDYHYYGMDVWGQGTTVTVSSGGGGSGGGGSGGGGSDIQMTQSP |
| | | | SSLSASLGDRVTITCRASQGIRNDLGWYQQKPGKAPKRLIYASSTLQSGV |
| | | | PSRFSGSGSGTEFTLTISSLQPEDFATYYCLQHNNFPWTFGQGTKVEIKS |
| | | | GGGGSEVQLVESGGGLVQPGGSLKLSCAASGFTFNKYAMNWVRQAPGKGL |
| | | | EWVARIRSKYNNYATYYADSVKDRFTISRDDSKNTAYLQMNNLKTEDTAV |
| | | | YYCVRHGNFGNSYISYWAYWGQGTLVTVSSGGGGSGGGGSGGGGSQTVVT |
| | | | QEPSLTVSPGGTVTLTCGSSTGAVTSGNYPNWVQQKPGQAPRGLIGGTKF |
| | | | LAPGTPARFSGSLLGGKAALTLSGVQPEDEAEYYCVLWYSNRWVFGGGTK |
| | | | LTVL |
| 351 | Flt3 VH-CDR1 | artificial | NARMGVS |
| 352 | Flt3 VH-CDR2 | artificial | HIFSNDEKTYSTSLKS |
| 353 | Flt3 VH-CDR3 | artificial | IPYYGSGSHNYGMDV |
| 354 | Flt3 VL-CDR1 | artificial | RASQDIRNDFG |
| 355 | Flt3 VL-CDR2 | artificial | AASTLQS |
| 356 | Flt3 VL-CDR3 | artificial | LQYNTYPWT |
| 357 | Flt3 VH region | artificial | QVTLKESGPVLVKPTETLTLTCTVSGFSLRNARMGVSWIRQPPGKALEWL |
| | | | AHIFSNDEKTYSTSLKSRLTISRDTSKGQVVLTMTKMDPVDTATYYCARI |
| | | | PYYGSGSHNYGMDVWGQGTTVTVSS |
| 358 | Flt3 VL region | artificial | DIQMTQSPSSLSASVGDRVTITCRASQDIRNDFGWYQQKPGKAPQRLLYA |
| | | | ASTLQSGVPSRFSGSGSGTEFTLTISSLQPEDFATYYCLQYNTYPWTFGQ |
| | | | GTKVEIK |
| 359 | second domain which | artificial | QVTLKESGPVLVKPTETLTLTCTVSGFSLRNARMGVSWIRQPPGKALEWL |
| | binds to FLT3 | | AHIFSNDEKTYSTSLKSRLTISRDTSKGQVVLTMTKMDPVDTATYYCARI |
| | comprises a | | PYYGSGSHNYGMDVWGQGTTVTVSSGGGGSGGGGSGGGGSDIQMTQSPSS |
| | polypeptide | | LSASVGDRVTITCRASQDIRNDFGWYQQKPGKAPQRLLYAASTLQSGVPS |
| | | | RFSGSGSGTEFTLTISSLQPEDFATYYCLQYNTYPWTFGQGTKVEIK |
| 360 | Antibody construct | artificial | QVTLKESGPVLVKPTETLTLTCTVSGFSLRNARMGVSWIRQPPGKALEWL |
| | binding to CD3 and | | AHIFSNDEKTYSTSLKSRLTISRDTSKGQVVLTMTKMDPVDTATYYCARI |
| | FLT3 | | PYYGSGSHNYGMDVWGQGTTVTVSSGGGGSGGGGSGGGGSDIQMTQSPSS |
| | | | LSASVGDRVTITCRASQDIRNDFGWYQQKPGKAPQRLLYAASTLQSGVPS |
| | | | RFSGSGSGTEFTLTISSLQPEDFATYYCLQYNTYPWTFGQGTKVEIKSGG |
| | | | GGSEVQLVESGGGLVQPGGSLKLSCAASGFTFNKYAMNWVRQAPGKGLEW |
| | | | VARIRSKYNNYATYYADSVKDRFTISRDDSKNTAYLQMNNLKTEDTAVYY |
| | | | CVRHGNFGNSYISYWAYWGQGTLVTVSSGGGGSGGGGSGGGGSQTVVTQE |
| | | | PSLTVSPGGTVTLTCGSSTGAVTSGNYPNWVQQKPGQAPRGLIGGTKFLA |
| | | | PGTPARFSGSLLGGKAALTLSGVQPEDEAEYYCVLWYSNRWVFGGGTKLT |
| | | | VL |
| 361 | Flt3 VH-CDR1 | artificial | NARMAVS |
| 362 | Flt3 VH-CDR2 | artificial | HIFSNGEKSYSTSLKS |
| 363 | Flt3 VH-CDR3 | artificial | IVGYSDWLLPFDH |
| 364 | Flt3 VL-CDR1 | artificial | RASQNINRFLN |
| 365 | Flt3 VL-CDR2 | artificial | AASSLQS |
| 366 | Flt3 VL-CDR3 | artificial | LQHNSYPWT |
| 367 | Flt3 VH region | artificial | QVTLKESGPALVKPTETLTLTCTVSGFSLSNARMAVSWIRQPPGKALEWL |
| | | | AHIFSNGEKSYSTSLKSRLTISKDTSKTQVVLTMTNTDPVDTATYFCARI |
| | | | VGYSDWLLPFDHWGQGIMVTVSS |
| 368 | Flt3 VL region | artificial | DIQMTQSPSSLSASVGDRVTITCRASQNINRFLNWYQQKPGKAPKLLIYA |
| | | | ASSLQSGVPSRFSGSGSGTDFTLTISSLQPEDFATYYCLQHNSYPWTFGQ |
| | | | GTKVDIK |
| 369 | second domain which | artificial | QVTLKESGPALVKPTETLTLTCTVSGFSLSNARMAVSWIRQPPGKALEWL |
| | binds to FLT3 | | AHIFSNGEKSYSTSLKSRLTISKDTSKTQVVLTMTNTDPVDTATYFCARI |
| | comprises a | | VGYSDWLLPFDHWGQGIMVTVSSGGGGSGGGGSGGGGSDIQMTQSPSSLS |
| | polypeptide | | ASVGDRVTITCRASQNINRFLNWYQQKPGKAPKLLIYAASSLQSGVPSRF |
| | | | SGSGSGTDFTLTISSLQPEDFATYYCLQHNSYPWTFGQGTKVDIK |
| 370 | Antibody construct | artificial | QVTLKESGPALVKPTETLTLTCTVSGFSLSNARMAVSWIRQPPGKALEWL |
| | binding to CD3 and | | AHIFSNGEKSYSTSLKSRLTISKDTSKTQVVLTMTNTDPVDTATYFCARI |
| | FLT3 | | VGYSDWLLPFDHWGQGIMVTVSSGGGGSGGGGSGGGGSDIQMTQSPSSLS |
| | | | ASVGDRVTITCRASQNINRFLNWYQQKPGKAPKLLIYAASSLQSGVPSRF |
| | | | SGSGSGTDFTLTISSLQPEDFATYYCLQHNSYPWTFGQGTKVDIKSGGGG |
| | | | SEVQLVESGGGLVQPGGSLKLSCAASGFTFNKYAMNWVRQAPGKGLEWVA |
| | | | RIRSKYNNYATYYADSVKDRFTISRDDSKNTAYLQMNNLKTEDTAVYYCV |
| | | | RHGNFGNSYISYWAYWGQGTLVTVSSGGGGSGGGGSGGGGSQTVVTQEPS |
| | | | LTVSPGGTVTLTCGSSTGAVTSGNYPNWVQQKPGQAPRGLIGGTKFLAPG |
| | | | TPARFSGSLLGGKAALTLSGVQPEDEAEYYCVLWYSNRWVFGGGTKLTVL |
| 371 | Flt3 VH-CDR1 | artificial | NAKMGVS |
| 372 | Flt3 VH-CDR2 | artificial | HIFSNDEKSYSTSLKS |
| 373 | Flt3 VH-CDR3 | artificial | IVGYGSGWYGYFDY |
| 374 | Flt3 VL-CDR1 | artificial | RASQDIRDDLG |
| 375 | Flt3 VL-CDR2 | artificial | GASTLQS |
| 376 | Flt3 VL-CDR3 | artificial | LQHNSYPLT |
| 377 | Flt3 VH region | artificial | QVTLKESGPALVKPTETLTLTCTLSGFSLNNAKMGVSWIRQPPGKALEWL |
| | | | AHIFSNDEKSYSTSLKSRLTISKDTSKGQVVLTMTNMDPVDTATYYCARI |
| | | | VGYGSGWYGYFDYWGQGTLVTVSS |
| 378 | Flt3 VL region | artificial | DIQMTQSPSSLSASVGDRVTITCRASQDIRDDLGWYQQKPGNAPKRLIYG |
| | | | ASTLQSGVPSRFSGSGSGTEFTLTISSLQPEDFATYYCLQHNSYPLTFGG |
| | | | GTKVDIK |
| 379 | second domain which | artificial | QVTLKESGPALVKPTETLTLTCTLSGFSLNNAKMGVSWIRQPPGKALEWL |
| | binds to FLT3 | | AHIFSNDEKSYSTSLKSRLTISKDTSKGQVVLTMTNMDPVDTATYYCARI |
| | comprises a | | VGYGSGWYGYFDYWGQGTLVTVSSGGGGSGGGGSGGGGSDIQMTQSPSSL |
| | polypeptide | | SASVGDRVTITCRASQDIRDDLGWYQQKPGNAPKRLIYGASTLQSGVPSR |
| | | | FSGSGSGTEFTLTISSLQPEDFATYYCLQHNSYPLTFGGGTKVDIK |
| 380 | Antibody construct | artificial | QVTLKESGPALVKPTETLTLTCTLSGFSLNNAKMGVSWIRQPPGKALEWL |
| | binding to CD3 and | | AHIFSNDEKSYSTSLKSRLTISKDTSKGQVVLTMTNMDPVDTATYYCARI |
| | FLT3 | | VGYGSGWYGYFDYWGQGTLVTVSSGGGGSGGGGSGGGGSDIQMTQSPSSL |
| | | | SASVGDRVTITCRASQDIRDDLGWYQQKPGNAPKRLIYGASTLQSGVPSR |
| | | | FSGSGSGTEFTLTISSLQPEDFATYYCLQHNSYPLTFGGGTKVDIKSGGG |
| | | | GSEVQLVESGGGLVQPGGSLKLSCAASGFTFNKYAMNWVRQAPGKGLEWV |
| | | | ARIRSKYNNYATYYADSVKDRFTISRDDSKNTAYLQMNNLKTEDTAVYYC |
| | | | VRHGNFGNSYISYWAYWGQGTLVTVSSGGGGSGGGGSGGGGSQTVVTQEP |
| | | | SLTVSPGGTVTLTCGSSTGAVTSGNYPNWVQQKPGQAPRGLIGGTKFLAP |
| | | | GTPARFSGSLLGGKAALTLSGVQPEDEAEYYCVLWYSNRWVFGGGTKLTV |
| | | | L |
| 381 | Flt3 VH-CDR1 | artificial | NARMGVS |
| 382 | Flt3 VH-CDR2 | artificial | HIFWNDEKSYSTSLKS |
| 383 | Flt3 VH-CDR3 | artificial | IPYYGSGSYNYGMDV |
| 384 | Flt3 VL-CDR1 | artificial | RASQGIRNDLG |
| 385 | Flt3 VL-CDR2 | artificial | AASSLQS |
| 386 | Flt3 VL-CDR3 | artificial | LQHNTYPLT |
| 387 | Flt3 VH region | artificial | QVTLKESGPMLVKPTETLTLTCTFSGFSLRNARMGVSWIRQPPGKALEWL |
| | | | AHIFWNDEKSYSTSLKSRLTISKDTSKSQVVLTMTNMDPVDTATYYCARI |
| | | | PYYGSGSYNYGMDVWGQGTTVTVSS |
| 388 | Flt3 VL region | artificial | DIQMTQSPSSLSASVGDRVTITCRASQGIRNDLGWYQQKPGKAPKRLIYA |
| | | | ASSLQSGVPSRFSGSGSGTEFTLTISSLQPEDFATYYCLQHNTYPLTFGG |
| | | | GTKVDIK |
| 389 | second domain which | artificial | QVTLKESGPMLVKPTETLTLTCTFSGFSLRNARMGVSWIRQPPGKALEWL |
| | binds to FLT3 | | AHIFWNDEKSYSTSLKSRLTISKDTSKSQVVLTMTNMDPVDTATYYCARI |
| | comprises a | | PYYGSGSYNYGMDVWGQGTTVTVSSGGGGSGGGGSGGGGSDIQMTQSPSS |
| | polypeptide | | LSASVGDRVTITCRASQGIRNDLGWYQQKPGKAPKRLIYAASSLQSGVPS |
| | | | RFSGSGSGTEFTLTISSLQPEDFATYYCLQHNTYPLTFGGGTKVDIK |
| 390 | Antibody construct | artificial | QVTLKESGPMLVKPTETLTLTCTFSGFSLRNARMGVSWIRQPPGKALEWL |
| | binding to CD3 and | | AHIFWNDEKSYSTSLKSRLTISKDTSKSQVVLTMTNMDPVDTATYYCARI |
| | FLT3 | | PYYGSGSYNYGMDVWGQGTTVTVSSGGGGSGGGGSGGGGSDIQMTQSPSS |
| | | | LSASVGDRVTITCRASQGIRNDLGWYQQKPGKAPKRLIYAASSLQSGVPS |
| | | | RFSGSGSGTEFTLTISSLQPEDFATYYCLQHNTYPLTFGGGTKVDIKSGG |
| | | | GGSEVQLVESGGGLVQPGGSLKLSCAASGFTFNKYAMNWVRQAPGKGLEW |
| | | | VARIRSKYNNYATYYADSVKDRFTISRDDSKNTAYLQMNNLKTEDTAVYY |
| | | | CVRHGNFGNSYISYWAYWGQGTLVTVSSGGGGSGGGGSGGGGSQTVVTQE |
| | | | PSLTVSPGGTVTLTCGSSTGAVTSGNYPNWVQQKPGQAPRGLIGGTKFLA |
| | | | PGTPARFSGSLLGGKAALTLSGVQPEDEAEYYCVLWYSNRWVFGGGTKLT |
| | | | VL |
| 391 | Flt3 VH-CDR1 | artificial | NARMAVS |
| 392 | Flt3 VH-CDR2 | artificial | HIFSNDEKSYSPSLKS |
| 393 | Flt3 VH-CDR3 | artificial | IVGYGTGWYGFFDY |
| 394 | Flt3 VL-CDR1 | artificial | RASQGIRNDLG |
| 395 | Flt3 VL-CDR2 | artificial | AASVLQS |
| 396 | Flt3 VL-CDR3 | artificial | LQHNSYPLT |
| 397 | Flt3 VH region | artificial | QVTLKESGPTLVKPTETLTLTCTLSGFSLNNARMAVSWIRQPPGKTLEWL |
| | | | AHIFSNDEKSYSPSLKSRLTISKDTSKSQVVLTMTNMDPEDTATYYCARI |
| | | | VGYGTGWYGFFDYWGQGILVTVSS |
| 398 | Flt3 VL region | artificial | DIQMTQSPSSLSASVGDRVTITCRASQGIRNDLGWFQQKPGKAPKRLIYA |
| | | | ASVLQSGVPSRFSGSGSGTEFTLTISSLQPEDFATYYCLQHNSYPLTFGG |
| | | | GTKVDIK |
| 399 | second domain which | artificial | QVTLKESGPTLVKPTETLTLTCTLSGFSLNNARMAVSWIRQPPGKTLEWL |
| | binds to FLT3 | | AHIFSNDEKSYSPSLKSRLTISKDTSKSQVVLTMTNMDPEDTATYYCARI |
| | comprises a | | VGYGTGWYGFFDYWGQGILVTVSSGGGGSGGGGSGGGGSDIQMTQSPSSL |
| | polypeptide | | SASVGDRVTITCRASQGIRNDLGWFQQKPGKAPKRLIYAASVLQSGVPSR |
| | | | FSGSGSGTEFTLTISSLQPEDFATYYCLQHNSYPLTFGGGTKVDIK |
| 400 | Antibody construct | artificial | QVTLKESGPTLVKPTETLTLTCTLSGFSLNNARMAVSWIRQPPGKTLEWL |
| | binding to CD3 and | | AHIFSNDEKSYSPSLKSRLTISKDTSKSQVVLTMTNMDPEDTATYYCARI |
| | FLT3 | | VGYGTGWYGFFDYWGQGILVTVSSGGGGSGGGGSGGGGSDIQMTQSPSSL |
| | | | SASVGDRVTITCRASQGIRNDLGWFQQKPGKAPKRLIYAASVLQSGVPSR |
| | | | FSGSGSGTEFTLTISSLQPEDFATYYCLQHNSYPLTFGGGTKVDIKSGGG |
| | | | GSEVQLVESGGGLVQPGGSLKLSCAASGFTFNKYAMNWVRQAPGKGLEWV |
| | | | ARIRSKYNNYATYYADSVKDRFTISRDDSKNTAYLQMNNLKTEDTAVYYC |
| | | | VRHGNFGNSYISYWAYWGQGTLVTVSSGGGGSGGGGSGGGGSQTVVTQEP |
| | | | SLTVSPGGTVTLTCGSSTGAVTSGNYPNWVQQKPGQAPRGLIGGTKFLAP |
| | | | GTPARFSGSLLGGKAALTLSGVQPEDEAEYYCVLWYSNRWVFGGGTKLTV |
| | | | L |
| 401 | Flt3 VH-CDR1 | artificial | NARMGVS |
| 402 | Flt3 VH-CDR2 | artificial | HIFSNDEKSYSTSLKN |
| 403 | Flt3 VH-CDR3 | artificial | IVGYGTGWFGYFDY |
| 404 | Flt3 VL-CDR1 | artificial | RASQDIRTDLA |
| 405 | Flt3 VL-CDR2 | artificial | AASSLQS |
| 406 | Flt3 VL-CDR3 | artificial | LQHNRYPLT |
| 407 | Flt3 VH region | artificial | QVTLKESGPTLVKPTETLTLTCTVSGFSLNNARMGVSWIRQPPGKALEWL |
| | | | AHIFSNDEKSYSTSLKNRLTISKDSSKTQVVLTMTNVDPVDTATYYCARI |
| | | | VGYGTGWFGYFDYWGQGTQVTVSS |
| 408 | Flt3 VL region | artificial | DIQMTQSPSSLSASVGDRVTITCRASQDIRTDLAWYQQKPGKAPKRLIYA |
| | | | ASSLQSGVPSRFSGSGSGTEFTLTISSLQPEDFATYYCLQHNRYPLTFGG |
| | | | GTKVDIK |
| 409 | second domain which | artificial | QVTLKESGPTLVKPTETLTLTCTVSGFSLNNARMGVSWIRQPPGKALEWL |
| | binds to FLT3 | | AHIFSNDEKSYSTSLKNRLTISKDSSKTQVVLTMTNVDPVDTATYYCARI |
| | comprises a | | VGYGTGWFGYFDYWGQGTQVTVSSGGGGSGGGGSGGGGSDIQMTQSPSSL |
| | polypeptide | | SASVGDRVTITCRASQDIRTDLAWYQQKPGKAPKRLIYAASSLQSGVPSR |
| | | | FSGSGSGTEFTLTISSLQPEDFATYYCLQHNRYPLTFGGGTKVDIK |
| 410 | Antibody construct | artificial | QVTLKESGPTLVKPTETLTLTCTVSGFSLNNARMGVSWIRQPPGKALEWL |
| | binding to CD3 and | | AHIFSNDEKSYSTSLKNRLTISKDSSKTQVVLTMTNVDPVDTATYYCARI |
| | FLT3 | | VGYGTGWFGYFDYWGQGTQVTVSSGGGGSGGGGSGGGGSDIQMTQSPSSL |
| | | | SASVGDRVTITCRASQDIRTDLAWYQQKPGKAPKRLIYAASSLQSGVPSR |
| | | | FSGSGSGTEFTLTISSLQPEDFATYYCLQHNRYPLTFGGGTKVDIKSGGG |
| | | | GSEVQLVESGGGLVQPGGSLKLSCAASGFTFNKYAMNWVRQAPGKGLEWV |
| | | | ARIRSKYNNYATYYADSVKDRFTISRDDSKNTAYLQMNNLKTEDTAVYYC |
| | | | VRHGNFGNSYISYWAYWGQGTLVTVSSGGGGSGGGGSGGGGSQTVVTQEP |
| | | | SLTVSPGGTVTLTCGSSTGAVTSGNYPNWVQQKPGQAPRGLIGGTKFLAP |
| | | | GTPARFSGSLLGGKAALTLSGVQPEDEAEYYCVLWYSNRWVFGGGTKLTV |
| | | | L |
| 411 | Flt3 VH-CDR1 | artificial | YARMGVS |
| 412 | Flt3 VH-CDR2 | artificial | QIFSNDEKSYSTSLKS |
| 413 | Flt3 VH-CDR3 | artificial | IVGYGTGWYGFFDY |
| 414 | Flt3 VL-CDR1 | artificial | RASQGIRNDLG |
| 415 | Flt3 VL-CDR2 | artificial | AASSLQS |
| 416 | Flt3 VL-CDR3 | artificial | LQHNSYPLT |
| 417 | Flt3 VH region | artificial | QVTLKESGPALVKPTETLTLTCTVSGFSLSYARMGVSWIRQPPGKALEWL |
| | | | AQIFSNDEKSYSTSLKSRLTISKGTSNSQVVLTMTNMDPEDTATYYCARI |
| | | | VGYGTGWYGFFDYWGQGILVTVSS |
| 418 | Flt3 VL region | artificial | DIQMTQSPSSLSASVGDRVTITCRASQGIRNDLGWYQQKPGKAPKRLIYA |
| | | | ASSLQSGVPSRFSGSGSGTEFTLTISSLQPEDFATYYCLQHNSYPLTFGG |
| | | | GTKVDIK |
| 419 | second domain which | artificial | QVTLKESGPALVKPTETLTLTCTVSGFSLSYARMGVSWIRQPPGKALEWL |
| | binds to FLT3 | | AQIFSNDEKSYSTSLKSRLTISKGTSNSQVVLTMTNMDPEDTATYYCARI |
| | comprises a | | VGYGTGWYGFFDYWGQGILVTVSSGGGGSGGGGSGGGGSDIQMTQSPSSL |
| | polypeptide | | SASVGDRVTITCRASQGIRNDLGWYQQKPGKAPKRLIYAASSLQSGVPSR |
| | | | FSGSGSGTEFTLTISSLQPEDFATYYCLQHNSYPLTFGGGTKVDIK |
| 420 | Antibody construct | artificial | QVTLKESGPALVKPTETLTLTCTVSGFSLSYARMGVSWIRQPPGKALEWL |
| | binding to CD3 and | | AQIFSNDEKSYSTSLKSRLTISKGTSNSQVVLTMTNMDPEDTATYYCARI |
| | FLT3 | | VGYGTGWYGFFDYWGQGILVTVSSGGGGSGGGGSGGGGSDIQMTQSPSSL |
| | | | SASVGDRVTITCRASQGIRNDLGWYQQKPGKAPKRLIYAASSLQSGVPSR |
| | | | FSGSGSGTEFTLTISSLQPEDFATYYCLQHNSYPLTFGGGTKVDIKSGGG |
| | | | GSEVQLVESGGGLVQPGGSLKLSCAASGFTFNKYAMNWVRQAPGKGLEWV |
| | | | ARIRSKYNNYATYYADSVKDRFTISRDDSKNTAYLQMNNLKTEDTAVYYC |
| | | | VRHGNFGNSYISYWAYWGQGTLVTVSSGGGGSGGGGSGGGGSQTVVTQEP |
| | | | SLTVSPGGTVTLTCGSSTGAVTSGNYPNWVQQKPGQAPRGLIGGTKFLAP |
| | | | GTPARFSGSLLGGKAALTLSGVQPEDEAEYYCVLWYSNRWVFGGGTKLTV |
| | | | L |
| 421 | Flt3 VH-CDR1 | artificial | NARMGVS |
| 422 | Flt3 VH-CDR2 | artificial | HIFSNDEKSYSTSLKS |
| 423 | Flt3 VH-CDR3 | artificial | IPGYGGNFYYHYYGMDV |
| 424 | Flt3 VL-CDR1 | artificial | RASQGIRNDLA |
| 425 | Flt3 VL-CDR2 | artificial | AASTVQS |
| 426 | Flt3 VL-CDR3 | artificial | LQHNSFPWT |
| 427 | Flt3 VH region | artificial | QVTLKESGPTLVKPTETLTLTCTVSGFSLSNARMGVSWIRQPPGKALEWL |
| | | | AHIFSNDEKSYSTSLKSRLTISKDTSKSQVVLTMTNMDPVDTATYYCARI |
| | | | PGYGGNFYYHYYGMDVWGQGTTVTVSS |
| 428 | Flt3 VL region | artificial | DIQMTQSPSSLSASVGDRVTITCRASQGIRNDLAWYQQKPGKAPKRLIYA |
| | | | ASTVQSGVPSRFSGSGSGTEFALTISSLQPEDFATYYCLQHNSFPWTFGQ |
| | | | GTKVDIK |
| 429 | second domain which | artificial | QVTLKESGPTLVKPTETLTLTCTVSGFSLSNARMGVSWIRQPPGKALEWL |
| | binds to FLT3 | | AHIFSNDEKSYSTSLKSRLTISKDTSKSQVVLTMTNMDPVDTATYYCARI |
| | comprises a | | PGYGGNFYYHYYGMDVWGQGTTVTVSSGGGGSGGGGSGGGGSDIQMTQSP |
| | polypeptide | | SSLSASVGDRVTITCRASQGIRNDLAWYQQKPGKAPKRLIYAASTVQSGV |
| | | | PSRFSGSGSGTEFALTISSLQPEDFATYYCLQHNSFPWTFGQGTKVDIK |
| 430 | Antibody construct | artificial | QVTLKESGPTLVKPTETLTLTCTVSGFSLSNARMGVSWIRQPPGKALEWL |
| | binding to CD3 and | | AHIFSNDEKSYSTSLKSRLTISKDTSKSQVVLTMTNMDPVDTATYYCARI |
| | FLT3 | | PGYGGNFYYHYYGMDVWGQGTTVTVSSGGGGSGGGGSGGGGSDIQMTQSP |
| | | | SSLSASVGDRVTITCRASQGIRNDLAWYQQKPGKAPKRLIYAASTVQSGV |
| | | | PSRFSGSGSGTEFALTISSLQPEDFATYYCLQHNSFPWTFGQGTKVDIKS |
| | | | GGGGSEVQLVESGGGLVQPGGSLKLSCAASGFTFNKYAMNWVRQAPGKGL |
| | | | EWVARIRSKYNNYATYYADSVKDRFTISRDDSKNTAYLQMNNLKTEDTAV |
| | | | YYCVRHGNFGNSYISYWAYWGQGTLVTVSSGGGGSGGGGSGGGGSQTVVT |
| | | | QEPSLTVSPGGTVTLTCGSSTGAVTSGNYPNWVQQKPGQAPRGLIGGTKF |
| | | | LAPGTPARFSGSLLGGKAALTLSGVQPEDEAEYYCVLWYSNRWVFGGGTK |
| | | | LTVL |
| 431 | Flt3 VH-CDR1 | artificial | NARMGVS |
| 432 | Flt3 VH-CDR2 | artificial | HIFSNDEKSYSTSLKS |
| 433 | Flt3 VH-CDR3 | artificial | MPEYSSGWSGAFDI |
| 434 | Flt3 VL-CDR1 | artificial | RASQDIRDDLG |
| 435 | Flt3 VL-CDR2 | artificial | GASTLQS |
| 436 | Flt3 VL-CDR3 | artificial | LQHNSYPLT |
| 437 | Flt3 VH region | artificial | QVTLKESGPVLVKPTETLTLTCTVSGFSFRNARMGVSWIRQPPGKALEWL |
| | | | AHIFSNDEKSYSTSLKSRLTISKDTSKSQVVLTLTNMDPVDTATYFCARM |
| | | | PEYSSGWSGAFDIWGQGTMVTVSS |
| 438 | Flt3 VL region | artificial | DIQMTQSPSSLSASVGDRVTITCRASQDIRDDLGWYQQKPGNAPKRLIYG |
| | | | ASTLQSGVPSRFSGSGSGTEFTLTISSLQPEDFATYYCLQHNSYPLTFGG |
| | | | GTKVDIK |
| 439 | second domain which | artificial | QVTLKESGPVLVKPTETLTLTCTVSGFSFRNARMGVSWIRQPPGKALEWL |
| | binds to FLT3 | | AHIFSNDEKSYSTSLKSRLTISKDTSKSQVVLTLTNMDPVDTATYFCARM |
| | comprises a | | PEYSSGWSGAFDIWGQGTMVTVSSGGGGSGGGGSGGGGSDIQMTQSPSSL |
| | polypeptide | | SASVGDRVTITCRASQDIRDDLGWYQQKPGNAPKRLIYGASTLQSGVPSR |
| | | | FSGSGSGTEFTLTISSLQPEDFATYYCLQHNSYPLTFGGGTKVDIK |
| 440 | Antibody construct | artificial | QVTLKESGPVLVKPTETLTLTCTVSGFSFRNARMGVSWIRQPPGKALEWL |
| | binding to CD3 and | | AHIFSNDEKSYSTSLKSRLTISKDTSKSQVVLTLTNMDPVDTATYFCARM |
| | FLT3 | | PEYSSGWSGAFDIWGQGTMVTVSSGGGGSGGGGSGGGGSDIQMTQSPSSL |
| | | | SASVGDRVTITCRASQDIRDDLGWYQQKPGNAPKRLIYGASTLQSGVPSR |
| | | | FSGSGSGTEFTLTISSLQPEDFATYYCLQHNSYPLTFGGGTKVDIKSGGG |
| | | | GSEVQLVESGGGLVQPGGSLKLSCAASGFTFNKYAMNWVRQAPGKGLEWV |
| | | | ARIRSKYNNYATYYADSVKDRFTISRDDSKNTAYLQMNNLKTEDTAVYYC |
| | | | VRHGNFGNSYISYWAYWGQGTLVTVSSGGGGSGGGGSGGGGSQTVVTQEP |
| | | | SLTVSPGGTVTLTCGSSTGAVTSGNYPNWVQQKPGQAPRGLIGGTKFLAP |
| | | | GTPARFSGSLLGGKAALTLSGVQPEDEAEYYCVLWYSNRWVFGGGTKLTV |
| | | | L |
| 441 | Flt3 VH-CDR1 | artificial | NAKMGVS |
| 442 | Flt3 VH-CDR2 | artificial | QIFSNGEKSYSTSLKS |
| 443 | Flt3 VH-CDR3 | artificial | IVGYGSGWYGYFDY |
| 444 | Flt3 VL-CDR1 | artificial | RASQGIRNDLG |
| 445 | Flt3 VL-CDR2 | artificial | GASTLQS |
| 446 | Flt3 VL-CDR3 | artificial | LQHNSYPLT |
| 447 | Flt3 VH region | artificial | QVTLKESGPVLVKPTETLTLTCTLSGFSLNNAKMGVSWIRQPPGKALEWL |
| | | | AQIFSNGEKSYSTSLKSRLTISKDTSKGQVVLTMTNMDPVDTATYYCSRI |
| | | | VGYGSGWYGYFDYWGQGTLVTVSS |
| 448 | Flt3 VL region | artificial | DIQMTQSPSSLSASVGDRVTITCRASQGIRNDLGWYQQKPGKAPKRLIYG |
| | | | ASTLQSGVPSRFSGSGSGTEFTLTISSLQPEDFATYYCLQHNSYPLTFGG |
| | | | GTKVEIK |
| 449 | second domain which | artificial | QVTLKESGPVLVKPTETLTLTCTLSGFSLNNAKMGVSWIRQPPGKALEWL |
| | binds to FLT3 | | AQIFSNGEKSYSTSLKSRLTISKDTSKGQVVLTMTNMDPVDTATYYCSRI |
| | comprises a | | VGYGSGWYGYFDYWGQGTLVTVSSGGGGSGGGGSGGGGSDIQMTQSPSSL |
| | polypeptide | | SASVGDRVTITCRASQGIRNDLGWYQQKPGKAPKRLIYGASTLQSGVPSR |
| | | | FSGSGSGTEFTLTISSLQPEDFATYYCLQHNSYPLTFGGGTKVEIK |
| 450 | Antibody construct | artificial | QVTLKESGPVLVKPTETLTLTCTLSGFSLNNAKMGVSWIRQPPGKALEWL |
| | binding to CD3 and | | AQIFSNGEKSYSTSLKSRLTISKDTSKGQVVLTMTNMDPVDTATYYCSRI |
| | FLT3 | | VGYGSGWYGYFDYWGQGTLVTVSSGGGGSGGGGSGGGGSDIQMTQSPSSL |
| | | | SASVGDRVTITCRASQGIRNDLGWYQQKPGKAPKRLIYGASTLQSGVPSR |
| | | | FSGSGSGTEFTLTISSLQPEDFATYYCLQHNSYPLTFGGGTKVEIKSGGG |
| | | | GSEVQLVESGGGLVQPGGSLKLSCAASGFTFNKYAMNWVRQAPGKGLEWV |
| | | | ARIRSKYNNYATYYADSVKDRFTISRDDSKNTAYLQMNNLKTEDTAVYYC |
| | | | VRHGNFGNSYISYWAYWGQGTLVTVSSGGGGSGGGGSGGGGSQTVVTQEP |
| | | | SLTVSPGGTVTLTCGSSTGAVTSGNYPNWVQQKPGQAPRGLIGGTKFLAP |
| | | | GTPARFSGSLLGGKAALTLSGVQPEDEAEYYCVLWYSNRWVFGGGTKLTV |
| | | | L |
| 451 | Flt3 VH-CDR1 | artificial | NARMGVS |
| 452 | Flt3 VH-CDR2 | artificial | NIFSNDEKSYSTSLKS |
| 453 | Flt3 VH-CDR3 | artificial | IVGYGSGWYGYFDY |
| 454 | Flt3 VL-CDR1 | artificial | RASQGIRNDLG |
| 455 | Flt3 VL-CDR2 | artificial | AASSLQS |
| 456 | Flt3 VL-CDR3 | artificial | LQHNSYPLT |
| 457 | Flt3 VH region | artificial | QVTLKESGPALVKPTETLTLTCTVSGFSLSNARMGVSWIRQPPGKALEWL |
| | | | ANIFSNDEKSYSTSLKSRLTISKGTSKSQVVLTMTNMDPEDTATYYCARI |
| | | | VGYGSGWYGYFDYWGQGTLVTVSS |
| 458 | Flt3 VL region | artificial | DIQMTQSPSSLSASVGDRVTITCRASQGIRNDLGWYQQKPGKAPQRLIYA |
| | | | ASSLQSGVPSRFSGSGSGTEFTLTISSLQPEDFATYYCLQHNSYPLTFGG |
| | | | GTKVEIK |
| 459 | second domain which | artificial | QVTLKESGPALVKPTETLTLTCTVSGFSLSNARMGVSWIRQPPGKALEWL |
| | binds to FLT3 | | ANIFSNDEKSYSTSLKSRLTISKGTSKSQVVLTMTNMDPEDTATYYCARI |
| | comprises a | | VGYGSGWYGYFDYWGQGTLVTVSSGGGGSGGGGSGGGGSDIQMTQSPSSL |
| | polypeptide | | SASVGDRVTITCRASQGIRNDLGWYQQKPGKAPQRLIYAASSLQSGVPSR |
| | | | FSGSGSGTEFTLTISSLQPEDFATYYCLQHNSYPLTFGGGTKVEIK |
| 460 | Antibody construct | artificial | QVTLKESGPALVKPTETLTLTCTVSGFSLSNARMGVSWIRQPPGKALEWL |
| | binding to CD3 and | | ANIFSNDEKSYSTSLKSRLTISKGTSKSQVVLTMTNMDPEDTATYYCARI |
| | FLT3 | | VGYGSGWYGYFDYWGQGTLVTVSSGGGGSGGGGSGGGGSDIQMTQSPSSL |
| | | | SASVGDRVTITCRASQGIRNDLGWYQQKPGKAPQRLIYAASSLQSGVPSR |
| | | | FSGSGSGTEFTLTISSLQPEDFATYYCLQHNSYPLTFGGGTKVEIKSGGG |
| | | | GSEVQLVESGGGLVQPGGSLKLSCAASGFTFNKYAMNWVRQAPGKGLEWV |
| | | | ARIRSKYNNYATYYADSVKDRFTISRDDSKNTAYLQMNNLKTEDTAVYYC |
| | | | VRHGNFGNSYISYWAYWGQGTLVTVSSGGGGSGGGGSGGGGSQTVVTQEP |
| | | | SLTVSPGGTVTLTCGSSTGAVTSGNYPNWVQQKPGQAPRGLIGGTKFLAP |
| | | | GTPARFSGSLLGGKAALTLSGVQPEDEAEYYCVLWYSNRWVFGGGTKLTV |
| | | | L |
| 461 | Flt3 VH-CDR1 | artificial | NARMGVS |
| 462 | Flt3 VH-CDR2 | artificial | HIFSNDEKSYSTSLKN |
| 463 | Flt3 VH-CDR3 | artificial | IVGYGSGWYGFFDY |
| 464 | Flt3 VL-CDR1 | artificial | RASQGIRNDLG |
| 465 | Flt3 VL-CDR2 | artificial | AASTLQS |
| 466 | Flt3 VL-CDR3 | artificial | LQHNSYPLT |
| 467 | Flt3 VH region | artificial | QVTLKESGPTLVKPTETLTLTCTLSGFSLNNARMGVSWIRQPPGKALEWL |
| | | | AHIFSNDEKSYSTSLKNRLTISKDSSKTQVVLTMTNVDPVDTATYYCARI |
| | | | VGYGSGWYGFFDYWGQGTLVTVSS |
| 468 | Flt3 VL region | artificial | DIQMTQSPSSLSASVGDRVTITCRASQGIRNDLGWYQQKPGKAPKRLIYA |
| | | | ASTLQSGVPSRFSGSGSGTEFTLTISSLQPEDFATYYCLQHNSYPLTFGG |
| | | | GTKVEIK |
| 469 | second domain which | artificial | QVTLKESGPTLVKPTETLTLTCTLSGFSLNNARMGVSWIRQPPGKALEWL |
| | binds to FLT3 | | AHIFSNDEKSYSTSLKNRLTISKDSSKTQVVLTMTNVDPVDTATYYCARI |
| | comprises a | | VGYGSGWYGFFDYWGQGTLVTVSSGGGGSGGGGSGGGGSDIQMTQSPSSL |
| | polypeptide | | SASVGDRVTITCRASQGIRNDLGWYQQKPGKAPKRLIYAASTLQSGVPSR |
| | | | FSGSGSGTEFTLTISSLQPEDFATYYCLQHNSYPLTFGGGTKVEIK |
| 470 | Antibody construct | artificial | QVTLKESGPTLVKPTETLTLTCTLSGFSLNNARMGVSWIRQPPGKALEWL |
| | binding to CD3 and | | AHIFSNDEKSYSTSLKNRLTISKDSSKTQVVLTMTNVDPVDTATYYCARI |
| | FLT3 | | VGYGSGWYGFFDYWGQGTLVTVSSGGGGSGGGGSGGGGSDIQMTQSPSSL |
| | | | SASVGDRVTITCRASQGIRNDLGWYQQKPGKAPKRLIYAASTLQSGVPSR |
| | | | FSGSGSGTEFTLTISSLQPEDFATYYCLQHNSYPLTFGGGTKVEIKSGGG |
| | | | GSEVQLVESGGGLVQPGGSLKLSCAASGFTFNKYAMNWVRQAPGKGLEWV |
| | | | ARIRSKYNNYATYYADSVKDRFTISRDDSKNTAYLQMNNLKTEDTAVYYC |
| | | | VRHGNFGNSYISYWAYWGQGTLVTVSSGGGGSGGGGSGGGGSQTVVTQEP |
| | | | SLTVSPGGTVTLTCGSSTGAVTSGNYPNWVQQKPGQAPRGLIGGTKFLAP |
| | | | GTPARFSGSLLGGKAALTLSGVQPEDEAEYYCVLWYSNRWVFGGGTKLTV |
| | | | L |
| 471 | Flt3 VH-CDR1 | artificial | NARMAVS |
| 472 | Flt3 VH-CDR2 | artificial | HIFSNDEKSYSTSLKS |
| 473 | Flt3 VH-CDR3 | artificial | IVGYGSGWYGYFDY |
| 474 | Flt3 VL-CDR1 | artificial | RASQDIRNDLG |
| 475 | Flt3 VL-CDR2 | artificial | AASTLQS |
| 476 | Flt3 VL-CDR3 | artificial | LQHNSYPLT |
| 477 | Flt3 VH region | artificial | QVTLKESGPALVKPTETLTLTCTLSGFSLNNARMAVSWIRQPPGKTLEWL |
| | | | AHIFSNDEKSYSTSLKSRLTISKDTSKGQVVLTMTNMDPVDTATYYCARI |
| | | | VGYGSGWYGYFDYWGQGTLVTVSS |
| 478 | Flt3 VL region | artificial | DIQMTQSPSSLSASVGDRVTITCRASQDIRNDLGWYQQKPGKAPKRLIYA |
| | | | ASTLQSGVPSRFSGSGSGTEFTLTISSLQPEDFATYYCLQHNSYPLTFGG |
| | | | GTKVEIK |
| 479 | second domain which | artificial | QVTLKESGPALVKPTETLTLTCTLSGFSLNNARMAVSWIRQPPGKTLEWL |
| | binds to FLT3 | | AHIFSNDEKSYSTSLKSRLTISKDTSKGQVVLTMTNMDPVDTATYYCARI |
| | comprises a | | VGYGSGWYGYFDYWGQGTLVTVSSGGGGSGGGGSGGGGSDIQMTQSPSSL |
| | polypeptide | | SASVGDRVTITCRASQDIRNDLGWYQQKPGKAPKRLIYAASTLQSGVPSR |
| | | | FSGSGSGTEFTLTISSLQPEDFATYYCLQHNSYPLTFGGGTKVEIK |
| 480 | Antibody construct | artificial | QVTLKESGPALVKPTETLTLTCTLSGFSLNNARMAVSWIRQPPGKTLEWL |
| | binding to CD3 and | | AHIFSNDEKSYSTSLKSRLTISKDTSKGQVVLTMTNMDPVDTATYYCARI |
| | FLT3 | | VGYGSGWYGYFDYWGQGTLVTVSSGGGGSGGGGSGGGGSDIQMTQSPSSL |
| | | | SASVGDRVTITCRASQDIRNDLGWYQQKPGKAPKRLIYAASTLQSGVPSR |
| | | | FSGSGSGTEFTLTISSLQPEDFATYYCLQHNSYPLTFGGGTKVEIKSGGG |
| | | | GSEVQLVESGGGLVQPGGSLKLSCAASGFTFNKYAMNWVRQAPGKGLEWV |
| | | | ARIRSKYNNYATYYADSVKDRFTISRDDSKNTAYLQMNNLKTEDTAVYYC |
| | | | VRHGNFGNSYISYWAYWGQGTLVTVSSGGGGSGGGGSGGGGSQTVVTQEP |
| | | | SLTVSPGGTVTLTCGSSTGAVTSGNYPNWVQQKPGQAPRGLIGGTKFLAP |
| | | | GTPARFSGSLLGGKAALTLSGVQPEDEAEYYCVLWYSNRWVFGGGTKLTV |
| | | | L |
| 481 | Flt3 VH-CDR1 | artificial | NARMAVS |
| 482 | Flt3 VH-CDR2 | artificial | HIFSNDEKSYSTSLKS |
| 483 | Flt3 VH-CDR3 | artificial | IVGYGSGWYGYFDY |
| 484 | Flt3 VL-CDR1 | artificial | RASQDIGNDLG |
| 485 | Flt3 VL-CDR2 | artificial | AASSLQS |
| 486 | Flt3 VL-CDR3 | artificial | LQHNSYPLT |
| 487 | Flt3 VH region | artificial | QVTLKESGPALVKPTETLTLTCTLSGFSLNNARMAVSWIRQPPGKTLEWL |
| | | | AHIFSNDEKSYSTSLKSRLTISKDTSKGQVVLTMTNMDPVDTATYYCARI |
| | | | VGYGSGWYGYFDYWGQGTLVTVSS |
| 488 | Flt3 VL region | artificial | DIQMTQSPSSLSASVGDRVTITCRASQDIGNDLGWYQQKPGKAPKRLIYA |
| | | | ASSLQSGVPSRFSGSGSGTEFTLTISSLQPEDFATYYCLQHNSYPLTFGG |
| | | | GTKVEIK |
| 489 | second domain which | artificial | QVTLKESGPALVKPTETLTLTCTLSGFSLNNARMAVSWIRQPPGKTLEWL |
| | binds to FLT3 | | AHIFSNDEKSYSTSLKSRLTISKDTSKGQVVLTMTNMDPVDTATYYCARI |
| | comprises a | | VGYGSGWYGYFDYWGQGTLVTVSSGGGGSGGGGSGGGGSDIQMTQSPSSL |
| | polypeptide | | SASVGDRVTITCRASQDIGNDLGWYQQKPGKAPKRLIYAASSLQSGVPSR |
| | | | FSGSGSGTEFTLTISSLQPEDFATYYCLQHNSYPLTFGGGTKVEIK |
| 490 | Antibody construct | artificial | QVTLKESGPALVKPTETLTLTCTLSGFSLNNARMAVSWIRQPPGKTLEWL |
| | binding to CD3 and | | AHIFSNDEKSYSTSLKSRLTISKDTSKGQVVLTMTNMDPVDTATYYCARI |
| | FLT3 | | VGYGSGWYGYFDYWGQGTLVTVSSGGGGSGGGGSGGGGSDIQMTQSPSSL |
| | | | SASVGDRVTITCRASQDIGNDLGWYQQKPGKAPKRLIYAASSLQSGVPSR |
| | | | FSGSGSGTEFTLTISSLQPEDFATYYCLQHNSYPLTFGGGTKVEIKSGGG |
| | | | GSEVQLVESGGGLVQPGGSLKLSCAASGFTFNKYAMNWVRQAPGKGLEWV |
| | | | ARIRSKYNNYATYYADSVKDRFTISRDDSKNTAYLQMNNLKTEDTAVYYC |
| | | | VRHGNFGNSYISYWAYWGQGTLVTVSSGGGGSGGGGSGGGGSQTVVTQEP |
| | | | SLTVSPGGTVTLTCGSSTGAVTSGNYPNWVQQKPGQAPRGLIGGTKFLAP |
| | | | GTPARFSGSLLGGKAALTLSGVQPEDEAEYYCVLWYSNRWVFGGGTKLTV |
| | | | L |
| 491 | Flt3 VH-CDR1 | artificial | NARMAVS |
| 492 | Flt3 VH-CDR2 | artificial | HIFSNDEKSYSTSLKS |
| 493 | Flt3 VH-CDR3 | artificial | IVGYGSGWYGYFDY |
| 494 | Flt3 VL-CDR1 | artificial | RASQDIRYDLA |
| 495 | Flt3 VL-CDR2 | artificial | AASSLQS |
| 496 | Flt3 VL-CDR3 | artificial | LQHNFYPLT |
| 497 | Flt3 VH region | artificial | QVTLKESGPVLVKPTETLTLTCTVSGFSLRNARMAVSWIRQPPGKTLEWL |
| | | | AHIFSNDEKSYSTSLKSRLTISKDTSKSQVVLTMTNMDPVDTATYYCARI |
| | | | VGYGSGWYGYFDYWGQGTLVTVSS |
| 498 | Flt3 VL region | artificial | DIQMTQSPSSVSASVGDRVTITCRASQDIRYDLAWYQQKPGKAPKRLIYA |
| | | | ASSLQSGVPSRFSGSGSGTEFTLTISSLQPEDFATYYCLQHNFYPLTFGG |
| | | | GTKVEIK |
| 499 | second domain which | artificial | QVTLKESGPVLVKPTETLTLTCTVSGFSLRNARMAVSWIRQPPGKTLEWL |
| | binds to FLT3 | | AHIFSNDEKSYSTSLKSRLTISKDTSKSQVVLTMTNMDPVDTATYYCARI |
| | comprises a | | VGYGSGWYGYFDYWGQGTLVTVSSGGGGSGGGGSGGGGSDIQMTQSPSSV |
| | polypeptide | | SASVGDRVTITCRASQDIRYDLAWYQQKPGKAPKRLIYAASSLQSGVPSR |
| | | | FSGSGSGTEFTLTISSLQPEDFATYYCLQHNFYPLTFGGGTKVEIK |
| 500 | Antibody construct | artificial | QVTLKESGPVLVKPTETLTLTCTVSGFSLRNARMAVSWIRQPPGKTLEWL |
| | binding to CD3 and | | AHIFSNDEKSYSTSLKSRLTISKDTSKSQVVLTMTNMDPVDTATYYCARI |
| | FLT3 | | VGYGSGWYGYFDYWGQGTLVTVSSGGGGSGGGGSGGGGSDIQMTQSPSSV |
| | | | SASVGDRVTITCRASQDIRYDLAWYQQKPGKAPKRLIYAASSLQSGVPSR |
| | | | FSGSGSGTEFTLTISSLQPEDFATYYCLQHNFYPLTFGGGTKVEIKSGGG |
| | | | GSEVQLVESGGGLVQPGGSLKLSCAASGFTFNKYAMNWVRQAPGKGLEWV |
| | | | ARIRSKYNNYATYYADSVKDRFTISRDDSKNTAYLQMNNLKTEDTAVYYC |
| | | | VRHGNFGNSYISYWAYWGQGTLVTVSSGGGGSGGGGSGGGGSQTVVTQEP |
| | | | SLTVSPGGTVTLTCGSSTGAVTSGNYPNWVQQKPGQAPRGLIGGTKFLAP |
| | | | GTPARFSGSLLGGKAALTLSGVQPEDEAEYYCVLWYSNRWVFGGGTKLTV |
| | | | L |
| 501 | Flt3 VH-CDR1 | artificial | NARMGVS |
| 502 | Flt3 VH-CDR2 | artificial | NIFSNDEKSYSTSLKS |
| 503 | Flt3 VH-CDR3 | artificial | IVGYGSGWYGYFDY |
| 504 | Flt3 VL-CDR1 | artificial | RASQDIRNDLG |
| 505 | Flt3 VL-CDR2 | artificial | ATSIRQS |
| 506 | Flt3 VL-CDR3 | artificial | LQHNSFPLT |
| 507 | Flt3 VH region | artificial | QVTLKESGPTLVKPTETLTLTCTVSGFSLSNARMGVSWIRQPPGKALEWL |
| | | | ANIFSNDEKSYSTSLKSRLTISKGTSKSQVVLTMTNVNPVDTGTYYCARI |
| | | | VGYGSGWYGYFDYWGQGTLVTVSS |
| 508 | Flt3 VL region | artificial | DIQMTQSPSSLSASVGDRVTITCRASQDIRNDLGWYQQKPGKAPKRLIYA |
| | | | TSIRQSGVPSRFTGSGSGTEFTLTISGLQPEDFATYFCLQHNSFPLTFGG |
| | | | GTKVEIK |
| 509 | second domain which | artificial | QVTLKESGPTLVKPTETLTLTCTVSGFSLSNARMGVSWIRQPPGKALEWL |
| | binds to FLT3 | | ANIFSNDEKSYSTSLKSRLTISKGTSKSQVVLTMTNVNPVDTGTYYCARI |
| | comprises a | | VGYGSGWYGYFDYWGQGTLVTVSSGGGGSGGGGSGGGGSDIQMTQSPSSL |
| | polypeptide | | SASVGDRVTITCRASQDIRNDLGWYQQKPGKAPKRLIYATSIRQSGVPSR |
| | | | FTGSGSGTEFTLTISGLQPEDFATYFCLQHNSFPLTFGGGTKVEIK |
| 510 | Antibody construct | artificial | QVTLKESGPTLVKPTETLTLTCTVSGFSLSNARMGVSWIRQPPGKALEWL |
| | binding to CD3 and | | ANIFSNDEKSYSTSLKSRLTISKGTSKSQVVLTMTNVNPVDTGTYYCARI |
| | FLT3 | | VGYGSGWYGYFDYWGQGTLVTVSSGGGGSGGGGSGGGGSDIQMTQSPSSL |
| | | | SASVGDRVTITCRASQDIRNDLGWYQQKPGKAPKRLIYATSIRQSGVPSR |
| | | | FTGSGSGTEFTLTISGLQPEDFATYFCLQHNSFPLTFGGGTKVEIKSGGG |
| | | | GSEVQLVESGGGLVQPGGSLKLSCAASGFTFNKYAMNWVRQAPGKGLEWV |
| | | | ARIRSKYNNYATYYADSVKDRFTISRDDSKNTAYLQMNNLKTEDTAVYYC |
| | | | VRHGNFGNSYISYWAYWGQGTLVTVSSGGGGSGGGGSGGGGSQTVVTQEP |
| | | | SLTVSPGGTVTLTCGSSTGAVTSGNYPNWVQQKPGQAPRGLIGGTKFLAP |
| | | | GTPARFSGSLLGGKAALTLSGVQPEDEAEYYCVLWYSNRWVFGGGTKLTV |
| | | | L |
| 511 | Flt3 VH-CDR1 | artificial | NARMGVS |
| 512 | Flt3 VH-CDR2 | artificial | HIFSNDEKSFSTSLKN |
| 513 | Flt3 VH-CDR3 | artificial | MVGYGSGWYAYFDY |
| 514 | Flt3 VL-CDR1 | artificial | RASQSISSYLN |
| 515 | Flt3 VL-CDR2 | artificial | AASSLQS |
| 516 | Flt3 VL-CDR3 | artificial | LQHNSYPLT |
| 517 | Flt3 VH region | artificial | QVTLKESGPVLVKPTQTLTLTCTFSGFSLSNARMGVSWIRQPPGKALEWL |
| | | | AHIFSNDEKSFSTSLKNRLTISKDTSKSQVVLTMTNMDPVDTATYYCARM |
| | | | VGYGSGWYAYFDYWGQGTQVIVSS |
| 518 | Flt3 VL region | artificial | DIQMTQSPSSLSASVGDRVTITCRASQSISSYLNWYQQKPGKAPKLLIYA |
| | | | ASSLQSGVPSRFSGSGSGTDFTLTISSLQPEDFATYYCLQHNSYPLTFGG |
| | | | GTKVEIK |
| 519 | second domain which | artificial | QVTLKESGPVLVKPTQTLTLTCTFSGFSLSNARMGVSWIRQPPGKALEWL |
| | binds to FLT3 | | AHIFSNDEKSFSTSLKNRLTISKDTSKSQVVLTMTNMDPVDTATYYCARM |
| | comprises a | | VGYGSGWYAYFDYWGQGTQVTVSSGGGGSGGGGSGGGGSDIQMTQSPSSL |
| | polypeptide | | SASVGDRVTITCRASQSISSYLNWYQQKPGKAPKLLIYAASSLQSGVPSR |
| | | | FSGSGSGTDFTLTISSLQPEDFATYYCLQHNSYPLTFGGGTKVEIK |
| 520 | Antibody construct | artificial | QVTLKESGPVLVKPTQTLTLTCTFSGFSLSNARMGVSWIRQPPGKALEWL |
| | binding to CD3 and | | AHIFSNDEKSFSTSLKNRLTISKDTSKSQVVLTMTNMDPVDTATYYCARM |
| | FLT3 | | VGYGSGWYAYFDYWGQGTQVTVSSGGGGSGGGGSGGGGSDIQMTQSPSSL |
| | | | SASVGDRVTITCRASQSISSYLNWYQQKPGKAPKLLIYAASSLQSGVPSR |
| | | | FSGSGSGTDFTLTISSLQPEDFATYYCLQHNSYPLTFGGGTKVEIKSGGG |
| | | | GSEVQLVESGGGLVQPGGSLKLSCAASGFTFNKYAMNWVRQAPGKGLEWV |
| | | | ARIRSKYNNYATYYADSVKDRFTISRDDSKNTAYLQMNNLKTEDTAVYYC |
| | | | VRHGNFGNSYISYWAYWGQGTLVTVSSGGGGSGGGGSGGGGSQTVVTQEP |
| | | | SLTVSPGGTVTLTCGSSTGAVTSGNYPNWVQQKPGQAPRGLIGGTKFLAP |
| | | | GTPARFSGSLLGGKAALTLSGVQPEDEAEYYCVLWYSNRWVFGGGTKLTV |
| | | | L |
| 521 | Flt3 VH-CDR1 | artificial | YARMGVS |
| 522 | Flt3 VH-CDR2 | artificial | QIFSNDEKSYSTSLKS |
| 523 | Flt3 VH-CDR3 | artificial | IVGYGTGWYGYFDY |
| 524 | Flt3 VL-CDR1 | artificial | RASQDIGDDLG |
| 525 | Flt3 VL-CDR2 | artificial | AASTLQS |
| 526 | Flt3 VL-CDR3 | artificial | LQHNSYPLT |
| 527 | Flt3 VH region | artificial | QVTLKESGPTLVKPTETLTLTCTVSGFSLSYARMGVSWIRQPPGKALEWL |
| | | | AQIFSNDEKSYSTSLKSRLTISKDTSKSQVVLTMTDMDPEDTATYYCARI |
| | | | VGYGTGWYGYFDYWGQGTQVTVSS |
| 528 | Flt3 VL region | artificial | DIQMTQSPSSLSASVGDRVTITCRASQDIGDDLGWYQQKPGKAPKRLIYA |
| | | | ASTLQSGVPFRFSGSGSGTDFTLTISSLQPEDFATYYCLQHNSYPLTFGG |
| | | | GTKVEIK |
| 529 | second domain which | artificial | QVTLKESGPTLVKPTETLTLTCTVSGFSLSYARMGVSWIRQPPGKALEWL |
| | binds to FLT3 | | AQIFSNDEKSYSTSLKSRLTISKDTSKSQVVLTMTDMDPEDTATYYCARI |
| | comprises a | | VGYGTGWYGYFDYWGQGTQVTVSSGGGGSGGGGSGGGGSDIQMTQSPSSL |
| | polypeptide | | SASVGDRVTITCRASQDIGDDLGWYQQKPGKAPKRLIYAASTLQSGVPFR |
| | | | FSGSGSGTDFTLTISSLQPEDFATYYCLQHNSYPLTFGGGTKVEIK |
| 530 | Antibody construct | artificial | QVTLKESGPTLVKPTETLTLTCTVSGFSLSYARMGVSWIRQPPGKALEWL |
| | binding to CD3 and | | AQIFSNDEKSYSTSLKSRLTISKDTSKSQVVLTMTDMDPEDTATYYCARI |
| | FLT3 | | VGYGTGWYGYFDYWGQGTQVTVSSGGGGSGGGGSGGGGSDIQMTQSPSSL |
| | | | SASVGDRVTITCRASQDIGDDLGWYQQKPGKAPKRLIYAASTLQSGVPFR |
| | | | FSGSGSGTDFTLTISSLQPEDFATYYCLQHNSYPLTFGGGTKVEIKSGGG |
| | | | GSEVQLVESGGGLVQPGGSLKLSCAASGFTFNKYAMNWVRQAPGKGLEWV |
| | | | ARIRSKYNNYATYYADSVKDRFTISRDDSKNTAYLQMNNLKTEDTAVYYC |
| | | | VRHGNFGNSYISYWAYWGQGTLVTVSSGGGGSGGGGSGGGGSQTVVTQEP |
| | | | SLTVSPGGTVTLTCGSSTGAVTSGNYPNWVQQKPGQAPRGLIGGTKFLAP |
| | | | GTPARFSGSLLGGKAALTLSGVQPEDEAEYYCVLWYSNRWVFGGGTKLTV |
| | | | L |
| 531 | Flt3 VH-CDR1 | artificial | NARMAVS |
| 532 | Flt3 VH-CDR2 | artificial | HIFSNDEKSYSTSLKS |
| 533 | Flt3 VH-CDR3 | artificial | IVGYGTGWYGFFDY |
| 534 | Flt3 VL-CDR1 | artificial | RASQGIRNDLA |
| 535 | Flt3 VL-CDR2 | artificial | AASSLQS |
| 536 | Flt3 VL-CDR3 | artificial | LQHNSYPLT |
| 537 | Flt3 VH region | artificial | QVTLKESGPALVKPTETLTLTCTLSGFSLNNARMAVSWIRQPPGKTLEWL |
| | | | AHIFSNDEKSYSTSLKSRLTISKDTSKSQVVLTMTNMDPEDTATYYCARI |
| | | | VGYGTGWYGFFDYWGQGILVTVSS |
| 538 | Flt3 VL region | artificial | DIQMTQSPSSLSASVGDRVTITCRASQGIRNDLAWYQQKPGKAPKRLIYA |
| | | | ASSLQSGVPSRFSGSGSGTEFTLTISSLQPEDFATYYCLQHNSYPLTFGG |
| | | | GTKVEIK |
| 539 | second domain which | artificial | QVTLKESGPALVKPTETLTLTCTLSGFSLNNARMAVSWIRQPPGKTLEWL |
| | binds to FLT3 | | AHIFSNDEKSYSTSLKSRLTISKDTSKSQVVLTMTNMDPEDTATYYCARI |
| | comprises a | | VGYGTGWYGFFDYWGQGILVTVSSGGGGSGGGGSGGGGSDIQMTQSPSSL |
| | polypeptide | | SASVGDRVTITCRASQGIRNDLAWYQQKPGKAPKRLIYAASSLQSGVPSR |
| | | | FSGSGSGTEFTLTISSLQPEDFATYYCLQHNSYPLTFGGGTKVEIK |
| 540 | Antibody construct | artificial | QVTLKESGPALVKPTETLTLTCTLSGFSLNNARMAVSWIRQPPGKTLEWL |
| | binding to CD3 and | | AHIFSNDEKSYSTSLKSRLTISKDTSKSQVVLTMTNMDPEDTATYYCARI |
| | FLT3 | | VGYGTGWYGFFDYWGQGILVTVSSGGGGSGGGGSGGGGSDIQMTQSPSSL |
| | | | SASVGDRVTITCRASQGIRNDLAWYQQKPGKAPKRLIYAASSLQSGVPSR |
| | | | FSGSGSGTEFTLTISSLQPEDFATYYCLQHNSYPLTFGGGTKVEIKSGGG |
| | | | GSEVQLVESGGGLVQPGGSLKLSCAASGFTFNKYAMNWVRQAPGKGLEWV |
| | | | ARIRSKYNNYATYYADSVKDRFTISRDDSKNTAYLQMNNLKTEDTAVYYC |
| | | | VRHGNFGNSYISYWAYWGQGTLVTVSSGGGGSGGGGSGGGGSQTVVTQEP |
| | | | SLTVSPGGTVTLTCGSSTGAVTSGNYPNWVQQKPGQAPRGLIGGTKFLAP |
| | | | GTPARFSGSLLGGKAALTLSGVQPEDEAEYYCVLWYSNRWVFGGGTKLTV |
| | | | L |
| 541 | Flt3 VH-CDR1 | artificial | NARMGVS |
| 542 | Flt3 VH-CDR2 | artificial | HIFSNDEKSYSTSLKS |
| 543 | Flt3 VH-CDR3 | artificial | IPGYGGNFYYHYYGMDV |
| 544 | Flt3 VL-CDR1 | artificial | RTSRGIRNDLG |
| 545 | Flt3 VL-CDR2 | artificial | AASTLQS |
| 546 | Flt3 VL-CDR3 | artificial | LQHNNFPWT |
| 547 | Flt3 VH region | artificial | QVTLKESGPALVKPTETLTLTCTFSGFSLSNARMGVSWIRQPPGKALEWL |
| | | | AHIFSNDEKSYSTSLKSRLTISKDTSKSQVVLTMTNMDPVDTATYYCARI |
| | | | PGYGGNFYYHYYGMDVWGQGTTVTVSS |
| 548 | Flt3 VL region | artificial | DIQMTQSPSSLSASVGDRVTITCRTSRGIRNDLGWYQQIPGRAPKRLIYA |
| | | | ASTLQSGVPSRFSGSGSGTEFTLTISSLQPEDFATYYCLQHNNFPWTFGQ |
| | | | GTKVEIK |
| 549 | second domain which | artificial | QVTLKESGPALVKPTETLTLTCTFSGFSLSNARMGVSWIRQPPGKALEWL |
| | binds to FLT3 | | AHIFSNDEKSYSTSLKSRLTISKDTSKSQVVLTMTNMDPVDTATYYCARI |
| | comprises a | | PGYGGNFYYHYYGMDVWGQGTTVTVSSGGGGSGGGGSGGGGSDIQMTQSP |
| | polypeptide | | SSLSASVGDRVTITCRTSRGIRNDLGWYQQIPGRAPKRLIYAASTLQSGV |
| | | | PSRFSGSGSGTEFTLTISSLQPEDFATYYCLQHNNFPWTFGQGTKVEIK |
| 550 | Antibody construct | artificial | QVTLKESGPALVKPTETLTLTCTFSGFSLSNARMGVSWIRQPPGKALEWL |
| | binding to CD3 and | | AHIFSNDEKSYSTSLKSRLTISKDTSKSQVVLTMTNMDPVDTATYYCARI |
| | FLT3 | | PGYGGNFYYHYYGMDVWGQGTTVTVSSGGGGSGGGGSGGGGSDIQMTQSP |
| | | | SSLSASVGDRVTITCRTSRGIRNDLGWYQQIPGRAPKRLIYAASTLQSGV |
| | | | PSRFSGSGSGTEFTLTISSLQPEDFATYYCLQHNNFPWTFGQGTKVEIKS |
| | | | GGGGSEVQLVESGGGLVQPGGSLKLSCAASGFTFNKYAMNWVRQAPGKGL |
| | | | EWVARIRSKYNNYATYYADSVKDRFTISRDDSKNTAYLQMNNLKTEDTAV |
| | | | YYCVRHGNFGNSYISYWAYWGQGTLVTVSSGGGGSGGGGSGGGGSQTVVT |
| | | | QEPSLTVSPGGTVTLTCGSSTGAVTSGNYPNWVQQKPGQAPRGLIGGTKF |
| | | | LAPGTPARFSGSLLGGKAALTLSGVQPEDEAEYYCVLWYSNRWVFGGGTK |
| | | | LTVL |
| 551 | Flt3 VH-CDR1 | artificial | NARMGVS |
| 552 | Flt3 VH-CDR2 | artificial | HIFSNDEKSYSTSLKS |
| 553 | Flt3 VH-CDR3 | artificial | MPEYSSGWSGAFDI |
| 554 | Flt3 VL-CDR1 | artificial | RASQGISNYLA |
| 555 | Flt3 VL-CDR2 | artificial | AASTLQS |
| 556 | Flt3 VL-CDR3 | artificial | LQHNTYPWT |
| 557 | Flt3 VH region | artificial | QVTLKESGPVLVKPTETLTLTCTVSGFSFRNARMGVSWIRQPPGKALEWL |
| | | | AHIFSNDEKSYSTSLKSRLTISKDTSKSQVVLTLTNMDPVDTATYFCARM |
| | | | PEYSSGWSGAFDIWGQGTMVTVSS |
| 558 | Flt3 VL region | artificial | DIQMTQSPSSLSASVGDRVTITCRASQGISNYLAWYQQKPGKAPKRLIYA |
| | | | ASTLQSGVPSRFSGSGSGTEFTLTISSLQPEDFATYYCLQHNTYPWTFGQ |
| | | | GTKVEIK |
| 559 | second domain which | artificial | QVTLKESGPVLVKPTETLTLTCTVSGFSFRNARMGVSWIRQPPGKALEWL |
| | binds to FLT3 | | AHIFSNDEKSYSTSLKSRLTISKDTSKSQVVLTLTNMDPVDTATYFCARM |
| | comprises a | | PEYSSGWSGAFDIWGQGTMVTVSSGGGGSGGGGSGGGGSDIQMTQSPSSL |
| | polypeptide | | SASVGDRVTITCRASQGISNYLAWYQQKPGKAPKRLIYAASTLQSGVPSR |
| | | | FSGSGSGTEFTLTISSLQPEDFATYYCLQHNTYPWTFGQGTKVEIK |
| 560 | Antibody construct | artificial | QVTLKESGPVLVKPTETLTLTCTVSGFSFRNARMGVSWIRQPPGKALEWL |
| | binding to CD3 and | | AHIFSNDEKSYSTSLKSRLTISKDTSKSQVVLTLTNMDPVDTATYFCARM |
| | FLT3 | | PEYSSGWSGAFDIWGQGTMVTVSSGGGGSGGGGSGGGGSDIQMTQSPSSL |
| | | | SASVGDRVTITCRASQGISNYLAWYQQKPGKAPKRLIYAASTLQSGVPSR |
| | | | FSGSGSGTEFTLTISSLQPEDFATYYCLQHNTYPWTFGQGTKVEIKSGGG |
| | | | GSEVQLVESGGGLVQPGGSLKLSCAASGFTFNKYAMNWVRQAPGKGLEWV |
| | | | ARIRSKYNNYATYYADSVKDRFTISRDDSKNTAYLQMNNLKTEDTAVYYC |
| | | | VRHGNFGNSYISYWAYWGQGTLVTVSSGGGGSGGGGSGGGGSQTVVTQEP |
| | | | SLTVSPGGTVTLTCGSSTGAVTSGNYPNWVQQKPGQAPRGLIGGTKFLAP |
| | | | GTPARFSGSLLGGKAALTLSGVQPEDEAEYYCVLWYSNRWVFGGGTKLTV |
| | | | L |
| 561 | Flt3 VH-CDR1 | artificial | NARMGVS |
| 562 | Flt3 VH-CDR2 | artificial | HIFSNDEKSYSTSLKS |
| 563 | Flt3 VH-CDR3 | artificial | MPEYSSGWSGAFDI |
| 564 | Flt3 VL-CDR1 | artificial | RASQDIGYDLG |
| 565 | Flt3 VL-CDR2 | artificial | AASTLQS |
| 566 | Flt3 VL-CDR3 | artificial | LQHNSFPWT |
| 567 | Flt3 VH region | artificial | QVTLKESGPALVKPTETLTLTCTVSGFSFRNARMGVSWIRQPPGKALEWL |
| | | | AHIFSNDEKSYSTSLKSRLTISKDTSKSQVVLTLTNMDPVDTATYFCARM |
| | | | PEYSSGWSGAFDIWGQGTMVTVSS |
| 568 | Flt3 VL region | artificial | DIQMTQSPSSLSASVGDRVTITCRASQDIGYDLGWYQQKPGKAPKRLIYA |
| | | | ASTLQSGVPSRFSGSGSGTEFTLIISSLQPEDFATYYCLQHNSFPWTFGQ |
| | | | GTKVEIK |
| 569 | second domain which | artificial | QVTLKESGPALVKPTETLTLTCTVSGFSFRNARMGVSWIRQPPGKALEWL |
| | binds to FLT3 | | AHIFSNDEKSYSTSLKSRLTISKDTSKSQVVLTLTNMDPVDTATYFCARM |
| | comprises a | | PEYSSGWSGAFDIWGQGTMVTVSSGGGGSGGGGSGGGGSDIQMTQSPSSL |
| | polypeptide | | SASVGDRVTITCRASQDIGYDLGWYQQKPGKAPKRLIYAASTLQSGVPSR |
| | | | FSGSGSGTEFTLIISSLQPEDFATYYCLQHNSFPWTFGQGTKVEIK |
| 570 | Antibody construct | artificial | QVTLKESGPALVKPTETLTLTCTVSGFSFRNARMGVSWIRQPPGKALEWL |
| | binding to CD3 and | | AHIFSNDEKSYSTSLKSRLTISKDTSKSQVVLTLTNMDPVDTATYFCARM |
| | FLT3 | | PEYSSGWSGAFDIWGQGTMVTVSSGGGGSGGGGSGGGGSDIQMTQSPSSL |
| | | | SASVGDRVTITCRASQDIGYDLGWYQQKPGKAPKRLIYAASTLQSGVPSR |
| | | | FSGSGSGTEFTLIISSLQPEDFATYYCLQHNSFPWTFGQGTKVEIKSGGG |
| | | | GSEVQLVESGGGLVQPGGSLKLSCAASGFTFNKYAMNWVRQAPGKGLEWV |
| | | | ARIRSKYNNYATYYADSVKDRFTISRDDSKNTAYLQMNNLKTEDTAVYYC |
| | | | VRHGNFGNSYISYWAYWGQGTLVTVSSGGGGSGGGGSGGGGSQTVVTQEP |
| | | | SLTVSPGGTVTLTCGSSTGAVTSGNYPNWVQQKPGQAPRGLIGGTKFLAP |
| | | | GTPARFSGSLLGGKAALTLSGVQPEDEAEYYCVLWYSNRWVFGGGTKLTV |
| | | | L |
| 571 | Flt3 VH-CDR1 | artificial | NVRMGVS |
| 572 | Flt3 VH-CDR2 | artificial | HIFSNDEKSYSTSLKS |
| 573 | Flt3 VH-CDR3 | artificial | MPEYSSGWSGAFDI |
| 574 | Flt3 VL-CDR1 | artificial | RASQDIRDDLV |
| 575 | Flt3 VL-CDR2 | artificial | AASTLQS |
| 576 | Flt3 VL-CDR3 | artificial | LQHHSYPWT |
| 577 | Flt3 VH region | artificial | QVTLKESGPALVKPTETLTLTCTVSGFSLRNVRMGVSWIRQPPGKALEWL |
| | | | AHIFSNDEKSYSTSLKSRLTISKDTSKSQVVLILTNMDPVDTATYFCARM |
| | | | PEYSSGWSGAFDIWGQGTMVTVSS |
| 578 | Flt3 VL region | artificial | DIQMTQSPSSLSASVGDRVTITCRASQDIRDDLVWYQQKPGKAPKRLIYA |
| | | | ASTLQSGVPSRFSGSGSGTEFTLTISSLQPEDFATYYCLQHHSYPWTFGQ |
| | | | GTKVEIK |
| 579 | second domain which | artificial | QVTLKESGPALVKPTETLTLTCTVSGFSLRNVRMGVSWIRQPPGKALEWL |
| | binds to FLT3 | | AHIFSNDEKSYSTSLKSRLTISKDTSKSQVVLILTNMDPVDTATYFCARM |
| | comprises a | | PEYSSGWSGAFDIWGQGTMVTVSSGGGGSGGGGSGGGGSDIQMTQSPSSL |
| | polypeptide | | SASVGDRVTITCRASQDIRDDLVWYQQKPGKAPKRLIYAASTLQSGVPSR |
| | | | FSGSGSGTEFTLTISSLQPEDFATYYCLQHHSYPWTFGQGTKVEIK |
| 580 | Antibody construct | artificial | QVTLKESGPALVKPTETLTLTCTVSGFSLRNVRMGVSWIRQPPGKALEWL |
| | binding to CD3 and | | AHIFSNDEKSYSTSLKSRLTISKDTSKSQVVLILTNMDPVDTATYFCARM |
| | FLT3 | | PEYSSGWSGAFDIWGQGTMVTVSSGGGGSGGGGSGGGGSDIQMTQSPSSL |
| | | | SASVGDRVTITCRASQDIRDDLVWYQQKPGKAPKRLIYAASTLQSGVPSR |
| | | | FSGSGSGTEFTLTISSLQPEDFATYYCLQHHSYPWTFGQGTKVEIKSGGG |
| | | | GSEVQLVESGGGLVQPGGSLKLSCAASGFTFNKYAMNWVRQAPGKGLEWV |
| | | | ARIRSKYNNYATYYADSVKDRFTISRDDSKNTAYLQMNNLKTEDTAVYYC |
| | | | VRHGNFGNSYISYWAYWGQGTLVTVSSGGGGSGGGGSGGGGSQTVVTQEP |
| | | | SLTVSPGGTVTLTCGSSTGAVTSGNYPNWVQQKPGQAPRGLIGGTKFLAP |
| | | | GTPARFSGSLLGGKAALTLSGVQPEDEAEYYCVLWYSNRWVFGGGTKLTV |
| | | | L |
| 581 | Flt3 VH-CDR1 | artificial | NARMGVS |
| 582 | Flt3 VH-CDR2 | artificial | HIFSNDEKSYSTSLKS |
| 583 | Flt3 VH-CDR3 | artificial | MPEYSSGWSGAFDI |
| 584 | Flt3 VL-CDR1 | artificial | RASQDIRDDLG |
| 585 | Flt3 VL-CDR2 | artificial | AASTLQS |
| 586 | Flt3 VL-CDR3 | artificial | LQHNSFPFT |
| 587 | Flt3 VH region | artificial | QVTLKESGPALVKPTETLTLTCTVSGFSFRNARMGVSWIRQPPGKALEWL |
| | | | AHIFSNDEKSYSTSLKSRLTISKDTSKSQVVLTLTNMDPVDTATYFCARM |
| | | | PEYSSGWSGAFDIWGQGTMVTVSS |
| 588 | Flt3 VL region | artificial | DIQMTQSPSSLSASVGDRVTITCRASQDIRDDLGWYQQKPGKAPKRLIYA |
| | | | ASTLQSGVPSRFTGGGSGTEFTLTISSLQPEDFATYYCLQHNSFPFTFGG |
| | | | GTKVEIK |
| 589 | second domain which | artificial | QVTLKESGPALVKPTETLTLTCTVSGFSFRNARMGVSWIRQPPGKALEWL |
| | binds to FLT3 | | AHIFSNDEKSYSTSLKSRLTISKDTSKSQVVLTLTNMDPVDTATYFCARM |
| | comprises a | | PEYSSGWSGAFDIWGQGTMVTVSSGGGGSGGGGSGGGGSDIQMTQSPSSL |
| | polypeptide | | SASVGDRVTITCRASQDIRDDLGWYQQKPGKAPKRLIYAASTLQSGVPSR |
| | | | FTGGGSGTEFTLTISSLQPEDFATYYCLQHNSFPFTFGGGTKVEIK |
| 590 | Antibody construct | artificial | QVTLKESGPALVKPTETLTLTCTVSGFSFRNARMGVSWIRQPPGKALEWL |
| | binding to CD3 and | | AHIFSNDEKSYSTSLKSRLTISKDTSKSQVVLTLTNMDPVDTATYFCARM |
| | FLT3 | | PEYSSGWSGAFDIWGQGTMVTVSSGGGGSGGGGSGGGGSDIQMTQSPSSL |
| | | | SASVGDRVTITCRASQDIRDDLGWYQQKPGKAPKRLIYAASTLQSGVPSR |
| | | | FTGGGSGTEFTLTISSLQPEDFATYYCLQHNSFPFTFGGGTKVEIKSGGG |
| | | | GSEVQLVESGGGLVQPGGSLKLSCAASGFTFNKYAMNWVRQAPGKGLEWV |
| | | | ARIRSKYNNYATYYADSVKDRFTISRDDSKNTAYLQMNNLKTEDTAVYYC |
| | | | VRHGNFGNSYISYWAYWGQGTLVTVSSGGGGSGGGGSGGGGSQTVVTQEP |
| | | | SLTVSPGGTVTLTCGSSTGAVTSGNYPNWVQQKPGQAPRGLIGGTKFLAP |
| | | | GTPARFSGSLLGGKAALTLSGVQPEDEAEYYCVLWYSNRWVFGGGTKLTV |
| | | | L |
| 591 | Flt3 VH-CDR1 | artificial | NARMGVS |
| 592 | Flt3 VH-CDR2 | artificial | HIFSNDEKSYSTSLKS |
| 593 | Flt3 VH-CDR3 | artificial | MPEYSSGWSGAFDI |
| 594 | Flt3 VL-CDR1 | artificial | RASQGIRNDLV |
| 595 | Flt3 VL-CDR2 | artificial | GTSTLQS |
| 296 | Flt3 VL-CDR3 | artificial | LQHNSYPLT |
| 597 | Flt3 VH region | artificial | QVTLKESGPVLVKPTETLTLTCTVSGFSFRNARMGVSWIRQPPGKALEWL |
| | | | AHIFSNDEKSYSTSLKSRLTISKDTSKSQVVLTLTNMDPVDTATYFCARM |
| | | | PEYSSGWSGAFDIWGQGTMVTVSS |
| 598 | Flt3 VL region | artificial | DIQMTQSPSSLSASVGDRVTITCRASQGIRNDLVWYQQKPGKAPKRLIYG |
| | | | TSTLQSGVPSRFSGSGSGTEFTLTISSLQPEDFATYYCLQHNSYPLTFGG |
| | | | GTKVEIK |
| 599 | second domain which | artificial | QVTLKESGPVLVKPTETLTLTCTVSGFSFRNARMGVSWIRQPPGKALEWL |
| | binds to FLT3 | | AHIFSNDEKSYSTSLKSRLTISKDTSKSQVVLTLTNMDPVDTATYFCARM |
| | comprises a | | PEYSSGWSGAFDIWGQGTMVTVSSGGGGSGGGGSGGGGSDIQMTQSPSSL |
| | polypeptide | | SASVGDRVTITCRASQGIRNDLVWYQQKPGKAPKRLIYGTSTLQSGVPSR |
| | | | FSGSGSGTEFTLTISSLQPEDFATYYCLQHNSYPLTFGGGTKVEIK |
| 600 | Antibody construct | artificial | QVTLKESGPVLVKPTETLTLTCTVSGFSFRNARMGVSWIRQPPGKALEWL |
| | binding to CD3 and | | AHIFSNDEKSYSTSLKSRLTISKDTSKSQVVLTLTNMDPVDTATYFCARM |
| | FLT3 | | PEYSSGWSGAFDIWGQGTMVTVSSGGGGSGGGGSGGGGSDIQMTQSPSSL |
| | | | SASVGDRVTITCRASQGIRNDLVWYQQKPGKAPKRLIYGTSTLQSGVPSR |
| | | | FSGSGSGTEFTLTISSLQPEDFATYYCLQHNSYPLTFGGGTKVEIKSGGG |
| | | | GSEVQLVESGGGLVQPGGSLKLSCAASGFTFNKYAMNWVRQAPGKGLEWV |
| | | | ARIRSKYNNYATYYADSVKDRFTISRDDSKNTAYLQMNNLKTEDTAVYYC |
| | | | VRHGNFGNSYISYWAYWGQGTLVTVSSGGGGSGGGGSGGGGSQTVVTQEP |
| | | | SLTVSPGGTVTLTCGSSTGAVTSGNYPNWVQQKPGQAPRGLIGGTKFLAP |
| | | | GTPARFSGSLLGGKAALTLSGVQPEDEAEYYCVLWYSNRWVFGGGTKLTV |
| | | | L |
| 601 | Flt3 VH-CDR1 | artificial | NARMGVS |
| 602 | Flt3 VH-CDR2 | artificial | HIFSNDEKSYSTSLKS |
| 603 | Flt3 VH-CDR3 | artificial | MPEYSSGWSGAFDI |
| 604 | Flt3 VL-CDR1 | artificial | RTSQGIRNDLV |
| 605 | Flt3 VL-CDR2 | artificial | AASTLQS |
| 606 | Flt3 VL-CDR3 | artificial | LQHYSYPLT |
| 607 | Flt3 VH region | artificial | QVTLKESGPVLVKPTETLTLTCTVSGFSFRNARMGVSWIRQPPGKALEWL |
| | | | AHIFSNDEKSYSTSLKSRLTISKDTSKSQVVLTLTNMDPVDTATYFCARM |
| | | | PEYSSGWSGAFDIWGQGTMVTVSS |
| 608 | Flt3 VL region | artificial | DIQMTQSPSSLSASVGDRVTITCRTSQGIRNDLVWYQQKPGKAPKRLIYA |
| | | | ASTLQSGVPSRFSGSGSGTEFTLTISSLQPEDFATYFCLQHYSYPLTFGG |
| | | | GTKVEIK |
| 609 | second domain which | artificial | QVTLKESGPVLVKPTETLTLTCTVSGFSFRNARMGVSWIRQPPGKALEWL |
| | binds to FLT3 | | AHIFSNDEKSYSTSLKSRLTISKDTSKSQVVLTLTNMDPVDTATYFCARM |
| | comprises a | | PEYSSGWSGAFDIWGQGTMVTVSSGGGGSGGGGSGGGGSDIQMTQSPSSL |
| | polypeptide | | SASVGDRVTITCRTSQGIRNDLVWYQQKPGKAPKRLIYAASTLQSGVPSR |
| | | | FSGSGSGTEFTLTISSLQPEDFATYFCLQHYSYPLTFGGGTKVEIK |
| 610 | Antibody construct | artificial | QVTLKESGPVLVKPTETLTLTCTVSGFSFRNARMGVSWIRQPPGKALEWL |
| | binding to CD3 and | | AHIFSNDEKSYSTSLKSRLTISKDTSKSQVVLTLTNMDPVDTATYFCARM |
| | FLT3 | | PEYSSGWSGAFDIWGQGTMVTVSSGGGGSGGGGSGGGGSDIQMTQSPSSL |
| | | | SASVGDRVTITCRTSQGIRNDLVWYQQKPGKAPKRLIYAASTLQSGVPSR |
| | | | FSGSGSGTEFTLTISSLQPEDFATYFCLQHYSYPLTFGGGTKVEIKSGGG |
| | | | GSEVQLVESGGGLVQPGGSLKLSCAASGFTFNKYAMNWVRQAPGKGLEWV |
| | | | ARIRSKYNNYATYYADSVKDRFTISRDDSKNTAYLQMNNLKTEDTAVYYC |
| | | | VRHGNFGNSYISYWAYWGQGTLVTVSSGGGGSGGGGSGGGGSQTVVTQEP |
| | | | SLTVSPGGTVTLTCGSSTGAVTSGNYPNWVQQKPGQAPRGLIGGTKFLAP |
| | | | GTPARFSGSLLGGKAALTLSGVQPEDEAEYYCVLWYSNRWVFGGGTKLTV |
| | | | L |
| 611 | Flt3 VH-CDR1 | artificial | NARMGVS |
| 612 | Flt3 VH-CDR2 | artificial | HIFSNDEKSYSTSLKS |
| 613 | Flt3 VH-CDR3 | artificial | MPEYSSGWSGAFDI |
| 614 | Flt3 VL-CDR1 | artificial | RASQGIGDDLG |
| 615 | Flt3 VL-CDR2 | artificial | ATSVLQS |
| 616 | Flt3 VL-CDR3 | artificial | LQHNSYPLT |
| 617 | Flt3 VH region | artificial | QVTLKESGPVLVKPTETLTLTCTVSGFSFRNARMGVSWIRQPPGKALEWL |
| | | | AHIFSNDEKSYSTSLKSRLTISKDTSKSQVVLTLTNMDPVDTATYFCARM |
| | | | PEYSSGWSGAFDIWGQGTMVTVSS |
| 618 | Flt3 VL region | artificial | DIQMTQSPSSLSASVGDRVTITCRASQGIGDDLGWYQQIPGKAPKRLIYA |
| | | | TSVLQSGVPSRFSGSGSGTEFTLTISSLQPEDFATYYCLQHNSYPLTFGG |
| | | | GTKVEIK |
| 619 | second domain which | artificial | QVTLKESGPVLVKPTETLTLTCTVSGFSFRNARMGVSWIRQPPGKALEWL |
| | binds to FLT3 | | AHIFSNDEKSYSTSLKSRLTISKDTSKSQVVLTLTNMDPVDTATYFCARM |
| | comprises a | | PEYSSGWSGAFDIWGQGTMVTVSSGGGGSGGGGSGGGGSDIQMTQSPSSL |
| | polypeptide | | SASVGDRVTITCRASQGIGDDLGWYQQIPGKAPKRLIYATSVLQSGVPSR |
| | | | FSGSGSGTEFTLTISSLQPEDFATYYCLQHNSYPLTFGGGTKVEIK |
| 620 | Antibody construct | artificial | QVTLKESGPVLVKPTETLTLTCTVSGFSFRNARMGVSWIRQPPGKALEWL |
| | binding to CD3 and | | AHIFSNDEKSYSTSLKSRLTISKDTSKSQVVLTLTNMDPVDTATYFCARM |
| | FLT3 | | PEYSSGWSGAFDIWGQGTMVTVSSGGGGSGGGGSGGGGSDIQMTQSPSSL |
| | | | SASVGDRVTITCRASQGIGDDLGWYQQIPGKAPKRLIYATSVLQSGVPSR |
| | | | FSGSGSGTEFTLTISSLQPEDFATYYCLQHNSYPLTFGGGTKVEIKSGGG |
| | | | GSEVQLVESGGGLVQPGGSLKLSCAASGFTFNKYAMNWVRQAPGKGLEWV |
| | | | ARIRSKYNNYATYYADSVKDRFTISRDDSKNTAYLQMNNLKTEDTAVYYC |
| | | | VRHGNFGNSYISYWAYWGQGTLVTVSSGGGGSGGGGSGGGGSQTVVTQEP |
| | | | SLTVSPGGTVTLTCGSSTGAVTSGNYPNWVQQKPGQAPRGLIGGTKFLAP |
| | | | GTPARFSGSLLGGKAALTLSGVQPEDEAEYYCVLWYSNRWVFGGGTKLTV |
| | | | L |
| 621 | Flt3 VH-CDR1 | artificial | NARMGVS |
| 622 | Flt3 VH-CDR2 | artificial | HIFSNDEKSYRTSLKS |
| 623 | Flt3 VH-CDR3 | artificial | IVGYGSGWYAYFDY |
| 624 | Flt3 VL-CDR1 | artificial | RASQGIRNDLG |
| 625 | Flt3 VL-CDR2 | artificial | AASSLQS |
| 626 | Flt3 VL-CDR3 | artificial | LQHNSYPLT |
| 627 | Flt3 VH region | artificial | QVTLKESGPALVKPTQTLTLTCTFSGFSLSNARMGVSWIRQPPGKALEWL |
| | | | AHIFSNDEKSYRTSLKSRLTISKDTSKSQVVLTMTNMDPVDTATYYCARI |
| | | | VGYGSGWYAYFDYWGQGTLVTVSS |
| 628 | Flt3 VL region | artificial | DIQMTQSPSSLSASVGDRVTITCRASQGIRNDLGWYQQKPGKAPKRLIYA |
| | | | ASSLQSGVPSRFSGSGSGTEFTLTISSLQPEDFATYYCLQHNSYPLTFGG |
| | | | GTKVEIK |
| 629 | second domain which | artificial | QVTLKESGPALVKPTQTLTLTCTFSGFSLSNARMGVSWIRQPPGKALEWL |
| | binds to FLT3 | | AHIFSNDEKSYRTSLKSRLTISKDTSKSQVVLTMTNMDPVDTATYYCARI |
| | comprises a | | VGYGSGWYAYFDYWGQGTLVTVSSGGGGSGGGGSGGGGSDIQMTQSPSSL |
| | polypeptide | | SASVGDRVTITCRASQGIRNDLGWYQQKPGKAPKRLIYAASSLQSGVPSR |
| | | | FSGSGSGTEFTLTISSLQPEDFATYYCLQHNSYPLTFGGGTKVEIK |
| 630 | Antibody construct | artificial | QVTLKESGPALVKPTQTLTLTCTFSGFSLSNARMGVSWIRQPPGKALEWL |
| | binding to CD3 and | | AHIFSNDEKSYRTSLKSRLTISKDTSKSQVVLTMTNMDPVDTATYYCARI |
| | FLT3 | | VGYGSGWYAYFDYWGQGTLVTVSSGGGGSGGGGSGGGGSDIQMTQSPSSL |
| | | | SASVGDRVTITCRASQGIRNDLGWYQQKPGKAPKRLIYAASSLQSGVPSR |
| | | | FSGSGSGTEFTLTISSLQPEDFATYYCLQHNSYPLTFGGGTKVEIKSGGG |
| | | | GSEVQLVESGGGLVQPGGSLKLSCAASGFTFNKYAMNWVRQAPGKGLEWV |
| | | | ARIRSKYNNYATYYADSVKDRFTISRDDSKNTAYLQMNNLKTEDTAVYYC |
| | | | VRHGNFGNSYISYWAYWGQGTLVTVSSGGGGSGGGGSGGGGSQTVVTQEP |
| | | | SLTVSPGGTVTLTCGSSTGAVTSGNYPNWVQQKPGQAPRGLIGGTKFLAP |
| | | | GTPARFSGSLLGGKAALTLSGVQPEDEAEYYCVLWYSNRWVFGGGTKLTV |
| | | | L |
| 631 | Flt3 VH-CDR1 | artificial | NARMGVS |
| 632 | Flt3 VH-CDR2 | artificial | LIYWNDDKRYSPSLKS |
| 633 | Flt3 VH-CDR3 | artificial | MVGYGSGWYAYFDY |
| 634 | Flt3 VL-CDR1 | artificial | RASQGIRNDLG |
| 635 | Flt3 VL-CDR2 | artificial | AASSLQS |
| 636 | Flt3 VL-CDR3 | artificial | LQHNSYPLT |
| 637 | Flt3 VH region | artificial | QVTLKESGPVLVKPTQTLTLTCTFSGFSLSNARMGVSWIRQPPGKALEWL |
| | | | ALIYWNDDKRYSPSLKSRLTITKDTSKNQVVLTMTNMDPVDTATYYCARM |
| | | | VGYGSGWYAYFDYWGQGTLVTVSS |
| 638 | Flt3 VL region | artificial | DIQMTQSPSSLSASVGDRVTITCRASQGIRNDLGWYQQKPGKAPKRLIYA |
| | | | ASSLQSGVPSRFSGSGSGTEFTLTISSLQPEDFATYYCLQHNSYPLTFGG |
| | | | GTKVEIK |
| 639 | second domain which | artificial | QVTLKESGPVLVKPTQTLTLTCTFSGFSLSNARMGVSWIRQPPGKALEWL |
| | binds to FLT3 | | ALIYWNDDKRYSPSLKSRLTITKDTSKNQVVLTMTNMDPVDTATYYCARM |
| | comprises a | | VGYGSGWYAYFDYWGQGTLVTVSSGGGGSGGGGSGGGGSDIQMTQSPSSL |
| | polypeptide | | SASVGDRVTITCRASQGIRNDLGWYQQKPGKAPKRLIYAASSLQSGVPSR |
| | | | FSGSGSGTEFTLTISSLQPEDFATYYCLQHNSYPLTFGGGTKVEIK |
| 640 | Antibody construct | artificial | QVTLKESGPVLVKPTQTLTLTCTFSGFSLSNARMGVSWIRQPPGKALEWL |
| | binding to CD3 and | | ALIYWNDDKRYSPSLKSRLTITKDTSKNQVVLTMTNMDPVDTATYYCARM |
| | FLT3 | | VGYGSGWYAYFDYWGQGTLVTVSSGGGGSGGGGSGGGGSDIQMTQSPSSL |
| | | | SASVGDRVTITCRASQGIRNDLGWYQQKPGKAPKRLIYAASSLQSGVPSR |
| | | | FSGSGSGTEFTLTISSLQPEDFATYYCLQHNSYPLTFGGGTKVEIKSGGG |
| | | | GSEVQLVESGGGLVQPGGSLKLSCAASGFTFNKYAMNWVRQAPGKGLEWV |
| | | | ARIRSKYNNYATYYADSVKDRFTISRDDSKNTAYLQMNNLKTEDTAVYYC |
| | | | VRHGNFGNSYISYWAYWGQGTLVTVSSGGGGSGGGGSGGGGSQTVVTQEP |
| | | | SLTVSPGGTVTLTCGSSTGAVTSGNYPNWVQQKPGQAPRGLIGGTKFLAP |
| | | | GTPARFSGSLLGGKAALTLSGVQPEDEAEYYCVLWYSNRWVFGGGTKLTV |
| | | | L |
| 641 | Flt3 VH-CDR1 | artificial | NARMGVS |
| 642 | Flt3 VH-CDR2 | artificial | HIFSNDEKSYSTSLKS |
| 643 | Flt3 VH-CDR3 | artificial | IVGYGTGWYGFFDY |
| 644 | Flt3 VL-CDR1 | artificial | RTSQGIRNDLG |
| 645 | Flt3 VL-CDR2 | artificial | AASSLQS |
| 646 | Flt3 VL-CDR3 | artificial | LQHNSYPLT |
| 647 | Flt3 VH region | artificial | QVTLKESGPALVKPTQTLTLTCTFSGFSLSNARMGVSWIRQPPGKALEWL |
| | | | AHIFSNDEKSYSTSLKSRLTISKDTSKSQVVLTMTDMDPEDTATYYCARI |
| | | | VGYGTGWYGFFDYWGQGILVTVSS |
| 648 | Flt3 VL region | artificial | DIQMTQSPSSLSASVGDRVTITCRTSQGIRNDLGWYQQKPGKAPKRLIYA |
| | | | ASSLQSGVPSRFSGSGSGTEFTLTISSLQPEDFATYYCLQHNSYPLTFGG |
| | | | GTKVEIK |
| 649 | second domain which | artificial | QVTLKESGPALVKPTQTLTLTCTFSGFSLSNARMGVSWIRQPPGKALEWL |
| | binds to FLT3 | | AHIFSNDEKSYSTSLKSRLTISKDTSKSQVVLTMTDMDPEDTATYYCARI |
| | comprises a | | VGYGTGWYGFFDYWGQGILVTVSSGGGGSGGGGSGGGGSDIQMTQSPSSL |
| | polypeptide | | SASVGDRVTITCRTSQGIRNDLGWYQQKPGKAPKRLIYAASSLQSGVPSR |
| | | | FSGSGSGTEFTLTISSLQPEDFATYYCLQHNSYPLTFGGGTKVEIK |
| 650 | Antibody construct | artificial | QVTLKESGPALVKPTQTLTLTCTFSGFSLSNARMGVSWIRQPPGKALEWL |
| | binding to CD3 and | | AHIFSNDEKSYSTSLKSRLTISKDTSKSQVVLTMTDMDPEDTATYYCARI |
| | FLT3 | | VGYGTGWYGFFDYWGQGILVTVSSGGGGSGGGGSGGGGSDIQMTQSPSSL |
| | | | SASVGDRVTITCRTSQGIRNDLGWYQQKPGKAPKRLIYAASSLQSGVPSR |
| | | | FSGSGSGTEFTLTISSLQPEDFATYYCLQHNSYPLTFGGGTKVEIKSGGG |
| | | | GSEVQLVESGGGLVQPGGSLKLSCAASGFTFNKYAMNWVRQAPGKGLEWV |
| | | | ARIRSKYNNYATYYADSVKDRFTISRDDSKNTAYLQMNNLKTEDTAVYYC |
| | | | VRHGNFGNSYISYWAYWGQGTLVTVSSGGGGSGGGGSGGGGSQTVVTQEP |
| | | | SLTVSPGGTVTLTCGSSTGAVTSGNYPNWVQQKPGQAPRGLIGGTKFLAP |
| | | | GTPARFSGSLLGGKAALTLSGVQPEDEAEYYCVLWYSNRWVFGGGTKLTV |
| | | | L |
| 651 | Flt3 VH-CDR1 | artificial | NARMGVS |
| 652 | Flt3 VH-CDR2 | artificial | HIFSNDEKSYSTSLKS |
| 653 | Flt3 VH-CDR3 | artificial | IVGYGSGWYGYFDY |
| 654 | Flt3 VL-CDR1 | artificial | RASQGIRNDLV |
| 655 | Flt3 VL-CDR2 | artificial | AASTLQS |
| 656 | Flt3 VL-CDR3 | artificial | LQHYSYPLT |
| 657 | Flt3 VH region | artificial | QVTLKESGPTLVKPTETLTLTCTVSGFSFRNARMGVSWIRQPPGKALEWL |
| | | | AHIFSNDEKSYSTSLKSRLTISKDTSKGQVVLTMTNMDPVDTATYYCARI |
| | | | VGYGSGWYGYFDYWGQGTLVTVSS |
| 658 | Flt3 VL region | artificial | DIQMTQSPSSLSASVGDRVTITCRASQGIRNDLVWYQQKPGKAPKRLIYA |
| | | | ASTLQSGVPSRFSGSGSGTEFILTISSLQPEDFATYFCLQHYSYPLTFGG |
| | | | GTKLEIK |
| 659 | second domain which | artificial | QVTLKESGPTLVKPTETLTLTCTVSGFSFRNARMGVSWIRQPPGKALEWL |
| | binds to FLT3 | | AHIFSNDEKSYSTSLKSRLTISKDTSKGQVVLTMTNMDPVDTATYYCARI |
| | comprises a | | VGYGSGWYGYFDYWGQGTLVTVSSGGGGSGGGGSGGGGSDIQMTQSPSSL |
| | polypeptide | | SASVGDRVTITCRASQGIRNDLVWYQQKPGKAPKRLIYAASTLQSGVPSR |
| | | | FSGSGSGTEFILTISSLQPEDFATYFCLQHYSYPLTFGGGTKLEIK |
| 660 | Antibody construct | artificial | QVTLKESGPTLVKPTETLTLTCTVSGFSFRNARMGVSWIRQPPGKALEWL |
| | binding to CD3 and | | AHIFSNDEKSYSTSLKSRLTISKDTSKGQVVLTMTNMDPVDTATYYCARI |
| | FLT3 | | VGYGSGWYGYFDYWGQGTLVTVSSGGGGSGGGGSGGGGSDIQMTQSPSSL |
| | | | SASVGDRVTITCRASQGIRNDLVWYQQKPGKAPKRLIYAASTLQSGVPSR |
| | | | FSGSGSGTEFILTISSLQPEDFATYFCLQHYSYPLTFGGGTKLEIKSGGG |
| | | | GSEVQLVESGGGLVQPGGSLKLSCAASGFTFNKYAMNWVRQAPGKGLEWV |
| | | | ARIRSKYNNYATYYADSVKDRFTISRDDSKNTAYLQMNNLKTEDTAVYYC |
| | | | VRHGNFGNSYISYWAYWGQGTLVTVSSGGGGSGGGGSGGGGSQTVVTQEP |
| | | | SLTVSPGGTVTLTCGSSTGAVTSGNYPNWVQQKPGQAPRGLIGGTKFLAP |
| | | | GTPARFSGSLLGGKAALTLSGVQPEDEAEYYCVLWYSNRWVFGGGTKLTV |
| | | | L |
| 661 | Flt3 VH-CDR1 | artificial | NARMGVS |
| 662 | Flt3 VH-CDR2 | artificial | HIFSNDEKSYSTSLKS |
| 663 | Flt3 VH-CDR3 | artificial | IVGYGSGWYGYFDY |
| 664 | Flt3 VL-CDR1 | artificial | RASQGIGDDLG |
| 665 | Flt3 VL-CDR2 | artificial | ATSVLQS |
| 666 | Flt3 VL-CDR3 | artificial | LQHNSYPLT |
| 667 | Flt3 VH region | artificial | QVTLKESGPVLVKPTETLTLTCTVSGFSLRNARMGVSWIRQPPGKTLEWL |
| | | | AHIFSNDEKSYSTSLKSRLTISKDTSKGQVVLTMTNMDPVDTATYYCARI |
| | | | VGYGSGWYGYFDYWGQGTLVTVSS |
| 668 | Flt3 VL region | artificial | DIQMTQSPSSLSASVGDRVTITCRASQGIGDDLGWYQQIPGKAPKRLIYA |
| | | | TSVLQSGVPSRFSGSGSGTEFTLTISSLQPEDFATYYCLQHNSYPLTFGG |
| | | | GTKLEIK |
| 669 | second domain which | artificial | QVTLKESGPVLVKPTETLTLTCTVSGFSLRNARMGVSWIRQPPGKTLEWL |
| | binds to FLT3 | | AHIFSNDEKSYSTSLKSRLTISKDTSKGQVVLTMTNMDPVDTATYYCARI |
| | comprises a | | VGYGSGWYGYFDYWGQGTLVTVSSGGGGSGGGGSGGGGSDIQMTQSPSSL |
| | polypeptide | | SASVGDRVTITCRASQGIGDDLGWYQQIPGKAPKRLIYATSVLQSGVPSR |
| | | | FSGSGSGTEFTLTISSLQPEDFATYYCLQHNSYPLTFGGGTKLEIK |
| 670 | Antibody construct | artificial | QVTLKESGPVLVKPTETLTLTCTVSGFSLRNARMGVSWIRQPPGKTLEWL |
| | binding to CD3 and | | AHIFSNDEKSYSTSLKSRLTISKDTSKGQVVLTMTNMDPVDTATYYCARI |
| | FLT3 | | VGYGSGWYGYFDYWGQGTLVTVSSGGGGSGGGGSGGGGSDIQMTQSPSSL |
| | | | SASVGDRVTITCRASQGIGDDLGWYQQIPGKAPKRLIYATSVLQSGVPSR |
| | | | FSGSGSGTEFTLTISSLQPEDFATYYCLQHNSYPLTFGGGTKLEIKSGGG |
| | | | GSEVQLVESGGGLVQPGGSLKLSCAASGFTFNKYAMNWVRQAPGKGLEWV |
| | | | ARIRSKYNNYATYYADSVKDRFTISRDDSKNTAYLQMNNLKTEDTAVYYC |
| | | | VRHGNFGNSYISYWAYWGQGTLVTVSSGGGGSGGGGSGGGGSQTVVTQEP |
| | | | SLTVSPGGTVTLTCGSSTGAVTSGNYPNWVQQKPGQAPRGLIGGTKFLAP |
| | | | GTPARFSGSLLGGKAALTLSGVQPEDEAEYYCVLWYSNRWVFGGGTKLTV |
| | | | L |
| 671 | Flt3 VH-CDR1 | artificial | NARMGVS |
| 672 | Flt3 VH-CDR2 | artificial | HIFWNDEKSYSTSLKS |
| 673 | Flt3 VH-CDR3 | artificial | IPYYGSGSYNYGMDV |
| 674 | Flt3 VL-CDR1 | artificial | RASQGIRNDLG |
| 675 | Flt3 VL-CDR2 | artificial | AASSLQS |
| 676 | Flt3 VL-CDR3 | artificial | LQHNSYPLT |
| 677 | Flt3 VH region | artificial | QVTLKESGPALVKPTETLTLTCTFSGFSLRNARMGVSWIRQPPGKALEWL |
| | | | AHIFWNDEKSYSTSLKSRLTISKDTSKSQVVLTMTNMDPVDTATYYCARI |
| | | | PYYGSGSYNYGMDVWGQGTTVTVSS |
| 678 | Flt3 VL region | artificial | DIQMTQSPSSLSASVGDRVTITCRASQGIRNDLGWYQQKPGKAPKRLIYA |
| | | | ASSLQSGVPSRFSGSGSGTEFTLTISSLQPEDFATYYCLQHNSYPLTFGG |
| | | | GTKLEIK |
| 679 | second domain which | artificial | QVTLKESGPALVKPTETLTLTCTFSGFSLRNARMGVSWIRQPPGKALEWL |
| | binds to FLT3 | | AHIFWNDEKSYSTSLKSRLTISKDTSKSQVVLTMTNMDPVDTATYYCARI |
| | comprises a | | PYYGSGSYNYGMDVWGQGTTVTVSSGGGGSGGGGSGGGGSDIQMTQSPSS |
| | polypeptide | | LSASVGDRVTITCRASQGIRNDLGWYQQKPGKAPKRLIYAASSLQSGVPS |
| | | | RFSGSGSGTEFTLTISSLQPEDFATYYCLQHNSYPLTFGGGTKLEIK |
| 680 | Antibody construct | artificial | QVTLKESGPALVKPTETLTLTCTFSGFSLRNARMGVSWIRQPPGKALEWL |
| | binding to CD3 and | | AHIFWNDEKSYSTSLKSRLTISKDTSKSQVVLTMTNMDPVDTATYYCARI |
| | FLT3 | | PYYGSGSYNYGMDVWGQGTTVTVSSGGGGSGGGGSGGGGSDIQMTQSPSS |
| | | | LSASVGDRVTITCRASQGIRNDLGWYQQKPGKAPKRLIYAASSLQSGVPS |
| | | | RFSGSGSGTEFTLTISSLQPEDFATYYCLQHNSYPLTFGGGTKLEIKSGG |
| | | | GGSEVQLVESGGGLVQPGGSLKLSCAASGFTFNKYAMNWVRQAPGKGLEW |
| | | | VARIRSKYNNYATYYADSVKDRFTISRDDSKNTAYLQMNNLKTEDTAVYY |
| | | | CVRHGNFGNSYISYWAYWGQGTLVTVSSGGGGSGGGGSGGGGSQTVVTQE |
| | | | PSLTVSPGGTVTLTCGSSTGAVTSGNYPNWVQQKPGQAPRGLIGGTKFLA |
| | | | PGTPARFSGSLLGGKAALTLSGVQPEDEAEYYCVLWYSNRWVFGGGTKLT |
| | | | VL |
| 681 | Flt3 VH-CDR1 | artificial | NARMGVS |
| 682 | Flt3 VH-CDR2 | artificial | HIFSNDEKSYSTSLKN |
| 683 | Flt3 VH-CDR3 | artificial | IVGYGTGWYGFFDY |
| 684 | Flt3 VL-CDR1 | artificial | RASQDIRDDLV |
| 685 | Flt3 VL-CDR2 | artificial | GTSTLQS |
| 686 | Flt3 VL-CDR3 | artificial | LQHHSYPLT |
| 687 | Flt3 VH region | artificial | QVTLKESGPALVKPTETLTLTCTVSGFSLNNARMGVSWIRQPPGKALEWL |
| | | | AHIFSNDEKSYSTSLKNRLTISKDSSKTQVVLTMTNVDPVDTATYYCARI |
| | | | VGYGTGWYGFFDYWGQGTQVTVSS |
| 688 | Flt3 VL region | artificial | DIQMTQSPSSLSASVGDRVTITCRASQDIRDDLVWYQQKPGKAPKRLIYG |
| | | | TSTLQSGVPSRFSGSGSGTEFTLTISSLQPEDFATYYCLQHHSYPLTFGG |
| | | | GTKLEIK |
| 689 | second domain which | artificial | QVTLKESGPALVKPTETLTLTCTVSGFSLNNARMGVSWIRQPPGKALEWL |
| | binds to FLT3 | | AHIFSNDEKSYSTSLKNRLTISKDSSKTQVVLTMTNVDPVDTATYYCARI |
| | comprises a | | VGYGTGWYGFFDYWGQGTQVTVSSGGGGSGGGGSGGGGSDIQMTQSPSSL |
| | polypeptide | | SASVGDRVTITCRASQDIRDDLVWYQQKPGKAPKRLIYGTSTLQSGVPSR |
| | | | FSGSGSGTEFTLTISSLQPEDFATYYCLQHHSYPLTFGGGTKLEIK |
| 690 | Antibody construct | artificial | QVTLKESGPALVKPTETLTLTCTVSGFSLNNARMGVSWIRQPPGKALEWL |
| | binding to CD3 and | | AHIFSNDEKSYSTSLKNRLTISKDSSKTQVVLTMTNVDPVDTATYYCARI |
| | FLT3 | | VGYGTGWYGFFDYWGQGTQVTVSSGGGGSGGGGSGGGGSDIQMTQSPSSL |
| | | | SASVGDRVTITCRASQDIRDDLVWYQQKPGKAPKRLIYGTSTLQSGVPSR |
| | | | FSGSGSGTEFTLTISSLQPEDFATYYCLQHHSYPLTFGGGTKLEIKSGGG |
| | | | GSEVQLVESGGGLVQPGGSLKLSCAASGFTFNKYAMNWVRQAPGKGLEWV |
| | | | ARIRSKYNNYATYYADSVKDRFTISRDDSKNTAYLQMNNLKTEDTAVYYC |
| | | | VRHGNFGNSYISYWAYWGQGTLVTVSSGGGGSGGGGSGGGGSQTVVTQEP |
| | | | SLTVSPGGTVTLTCGSSTGAVTSGNYPNWVQQKPGQAPRGLIGGTKFLAP |
| | | | GTPARFSGSLLGGKAALTLSGVQPEDEAEYYCVLWYSNRWVFGGGTKLTV |
| | | | L |
| 691 | Flt3 VH-CDR1 | artificial | YARMGVS |
| 692 | Flt3 VH-CDR2 | artificial | HIFSNDEKSYSTSLKS |
| 693 | Flt3 VH-CDR3 | artificial | MPEYSSGWSGAFDI |
| 694 | Flt3 VL-CDR1 | artificial | RASQDIRNDLA |
| 695 | Flt3 VL-CDR2 | artificial | AASSLQS |
| 696 | Flt3 VL-CDR3 | artificial | LQHNSYPLT |
| 697 | Flt3 VH region | artificial | QVTLKESGPTLVKPTETLTLTCTFSGFSLRYARMGVSWIRQPPGKALEWL |
| | | | AHIFSNDEKSYSTSLKSRLTISKDTSKSQVVLTLTNMDPVDTATYFCARM |
| | | | PEYSSGWSGAFDIWGQGTMVTVSS |
| 698 | Flt3 VL region | artificial | DIQMTQSPSSLSASVGDRVTITCRASQDIRNDLAWYQQKPGKAPKRLIYA |
| | | | ASSLQSGVPSRFSGSGSGTEFTLTISSLQPEDFATYYCLQHNSYPLTFGG |
| | | | GTKLEIK |
| 699 | second domain which | artificial | QVTLKESGPTLVKPTETLTLTCTFSGFSLRYARMGVSWIRQPPGKALEWL |
| | binds to FLT3 | | AHIFSNDEKSYSTSLKSRLTISKDTSKSQVVLTLTNMDPVDTATYFCARM |
| | comprises a | | PEYSSGWSGAFDIWGQGTMVTVSSGGGGSGGGGSGGGGSDIQMTQSPSSL |
| | polypeptide | | SASVGDRVTITCRASQDIRNDLAWYQQKPGKAPKRLIYAASSLQSGVPSR |
| | | | FSGSGSGTEFTLTISSLQPEDFATYYCLQHNSYPLTFGGGTKLEIK |
| 700 | Antibody construct | artificial | QVTLKESGPTLVKPTETLTLTCTFSGFSLRYARMGVSWIRQPPGKALEWL |
| | binding to CD3 and | | AHIFSNDEKSYSTSLKSRLTISKDTSKSQVVLTLTNMDPVDTATYFCARM |
| | FLT3 | | PEYSSGWSGAFDIWGQGTMVTVSSGGGGSGGGGSGGGGSDIQMTQSPSSL |
| | | | SASVGDRVTITCRASQDIRNDLAWYQQKPGKAPKRLIYAASSLQSGVPSR |
| | | | FSGSGSGTEFTLTISSLQPEDFATYYCLQHNSYPLTFGGGTKLEIKSGGG |
| | | | GSEVQLVESGGGLVQPGGSLKLSCAASGFTFNKYAMNWVRQAPGKGLEWV |
| | | | ARIRSKYNNYATYYADSVKDRFTISRDDSKNTAYLQMNNLKTEDTAVYYC |
| | | | VRHGNFGNSYISYWAYWGQGTLVTVSSGGGGSGGGGSGGGGSQTVVTQEP |
| | | | SLTVSPGGTVTLTCGSSTGAVTSGNYPNWVQQKPGQAPRGLIGGTKFLAP |
| | | | GTPARFSGSLLGGKAALTLSGVQPEDEAEYYCVLWYSNRWVFGGGTKLTV |
| | | | L |
| 701 | Flt3 VH-CDR1 | artificial | NIKMGVS |
| 702 | Flt3 VH-CDR2 | artificial | HIFSNDEKSYSTSLKS |
| 703 | Flt3 VH-CDR3 | artificial | MPEYSSGWSGAFDI |
| 704 | Flt3 VL-CDR1 | artificial | RASQDISNYLA |
| 705 | Flt3 VL-CDR2 | artificial | AASSLQS |
| 706 | Flt3 VL-CDR3 | artificial | LQHNSFPLT |
| 707 | Flt3 VH region | artificial | QVTLKESGPVLVKPTETLTLTCTVSGFSLRNIKMGVSWIRQPPGKALEWL |
| | | | AHIFSNDEKSYSTSLKSRLTISKDTSKSQVVLTLTNMDPVDTATYFCARM |
| | | | PEYSSGWSGAFDIWGQGTMVTVSS |
| 708 | Flt3 VL region | artificial | DIQMTQSPSSLSASVGDRVTITCRASQDISNYLAWYQQKPGKAPKRLIYA |
| | | | ASSLQSGVPSRFSGSGSGTEFTLTISSLQPEDFATYYCLQHNSFPLTFGG |
| | | | GTKLEIK |
| 709 | second domain which | artificial | QVTLKESGPVLVKPTETLTLTCTVSGFSLRNIKMGVSWIRQPPGKALEWL |
| | binds to FLT3 | | AHIFSNDEKSYSTSLKSRLTISKDTSKSQVVLTLTNMDPVDTATYFCARM |
| | comprises a | | PEYSSGWSGAFDIWGQGTMVTVSSGGGGSGGGGSGGGGSDIQMTQSPSSL |
| | polypeptide | | SASVGDRVTITCRASQDISNYLAWYQQKPGKAPKRLIYAASSLQSGVPSR |
| | | | FSGSGSGTEFTLTISSLQPEDFATYYCLQHNSFPLTFGGGTKLEIK |
| 710 | Antibody construct | artificial | QVTLKESGPVLVKPTETLTLTCTVSGFSLRNIKMGVSWIRQPPGKALEWL |
| | binding to CD3 and | | AHIFSNDEKSYSTSLKSRLTISKDTSKSQVVLTLTNMDPVDTATYFCARM |
| | FLT3 | | PEYSSGWSGAFDIWGQGTMVTVSSGGGGSGGGGSGGGGSDIQMTQSPSSL |
| | | | SASVGDRVTITCRASQDISNYLAWYQQKPGKAPKRLIYAASSLQSGVPSR |
| | | | FSGSGSGTEFTLTISSLQPEDFATYYCLQHNSFPLTFGGGTKLEIKSGGG |
| | | | GSEVQLVESGGGLVQPGGSLKLSCAASGFTFNKYAMNWVRQAPGKGLEWV |
| | | | ARIRSKYNNYATYYADSVKDRFTISRDDSKNTAYLQMNNLKTEDTAVYYC |
| | | | VRHGNFGNSYISYWAYWGQGTLVTVSSGGGGSGGGGSGGGGSQTVVTQEP |
| | | | SLTVSPGGTVTLTCGSSTGAVTSGNYPNWVQQKPGQAPRGLIGGTKFLAP |
| | | | GTPARFSGSLLGGKAALTLSGVQPEDEAEYYCVLWYSNRWVFGGGTKLTV |
| | | | L |
| 711 | Flt3 VH-CDR1 | artificial | NARMGVS |
| 712 | Flt3 VH-CDR2 | artificial | HIFSNDEKSYSTSLKS |
| 713 | Flt3 VH-CDR3 | artificial | MPEYSSGWSGAFDI |
| 714 | Flt3 VL-CDR1 | artificial | RASQGIRNDLG |
| 715 | Flt3 VL-CDR2 | artificial | AASSLQS |
| 716 | Flt3 VL-CDR3 | artificial | LQHNSYPLT |
| 717 | Flt3 VH region | artificial | QVTLKESGPVLVKPTETLTLTCTVSGFSFRNARMGVSWIRQPPGKALEWL |
| | | | AHIFSNDEKSYSTSLKSRLTISKDTSKSQVVLTLTNMDPVDTATYFCARM |
| | | | PEYSSGWSGAFDIWGQGTLVTVSS |
| 718 | Flt3 VL region | artificial | DIQMTQSPSSLSASVGDRVTITCRASQGIRNDLGWYQQKPGKAPKRLIYA |
| | | | ASSLQSGVPSRFSGSGSGTEFTLTISSLQPEDFATYYCLQHNSYPLTFGG |
| | | | GTKLEIK |
| 719 | second domain which | artificial | QVTLKESGPVLVKPTETLTLTCTVSGFSFRNARMGVSWIRQPPGKALEWL |
| | binds to FLT3 | | AHIFSNDEKSYSTSLKSRLTISKDTSKSQVVLTLTNMDPVDTATYFCARM |
| | comprises a | | PEYSSGWSGAFDIWGQGTLVTVSSGGGGSGGGGSGGGGSDIQMTQSPSSL |
| | polypeptide | | SASVGDRVTITCRASQGIRNDLGWYQQKPGKAPKRLIYAASSLQSGVPSR |
| | | | FSGSGSGTEFTLTISSLQPEDFATYYCLQHNSYPLTFGGGTKLEIK |
| 720 | Antibody construct | artificial | QVTLKESGPVLVKPTETLTLTCTVSGFSFRNARMGVSWIRQPPGKALEWL |
| | binding to CD3 and | | AHIFSNDEKSYSTSLKSRLTISKDTSKSQVVLTLTNMDPVDTATYFCARM |
| | FLT3 | | PEYSSGWSGAFDIWGQGTLVTVSSGGGGSGGGGSGGGGSDIQMTQSPSSL |
| | | | SASVGDRVTITCRASQGIRNDLGWYQQKPGKAPKRLIYAASSLQSGVPSR |
| | | | FSGSGSGTEFTLTISSLQPEDFATYYCLQHNSYPLTFGGGTKLEIKSGGG |
| | | | GSEVQLVESGGGLVQPGGSLKLSCAASGFTFNKYAMNWVRQAPGKGLEWV |
| | | | ARIRSKYNNYATYYADSVKDRFTISRDDSKNTAYLQMNNLKTEDTAVYYC |
| | | | VRHGNFGNSYISYWAYWGQGTLVTVSSGGGGSGGGGSGGGGSQTVVTQEP |
| | | | SLTVSPGGTVTLTCGSSTGAVTSGNYPNWVQQKPGQAPRGLIGGTKFLAP |
| | | | GTPARFSGSLLGGKAALTLSGVQPEDEAEYYCVLWYSNRWVFGGGTKLTV |
| | | | L |
| 721 | Flt3 VH-CDR1 | artificial | NARMGVS |
| 722 | Flt3 VH-CDR2 | artificial | HIFSNDEKSYSTSLKN |
| 723 | Flt3 VH-CDR3 | artificial | IVGYGSGWYGFFDY |
| 724 | Flt3 VL-CDR1 | artificial | RASQGIRNDLG |
| 725 | Flt3 VL-CDR2 | artificial | AASTLQS |
| 726 | Flt3 VL-CDR3 | artificial | LQHNSYPLT |
| 727 | Flt3 VH region | artificial | QVTLKESGPTLVKPTETLTLTCTLSGFSLNNARMGVSWIRQPPGKCLEWL |
| | | | AHIFSNDEKSYSTSLKNRLTISKDSSKTQVVLTMTNVDPVDTATYYCARI |
| | | | VGYGSGWYGFFDYWGQGTLVTVSS |
| 728 | Flt3 VL region | artificial | DIQMTQSPSSLSASVGDRVTITCRASQGIRNDLGWYQQKPGKAPKRLIYA |
| | | | ASTLQSGVPSRFSGSGSGTEFTLTISSLQPEDFATYYCLQHNSYPLTFGC |
| | | | GTKVEIK |
| 729 | second domain which | artificial | QVTLKESGPTLVKPTETLTLTCTLSGFSLNNARMGVSWIRQPPGKCLEWL |
| | binds to FLT3 | | AHIFSNDEKSYSTSLKNRLTISKDSSKTQVVLTMTNVDPVDTATYYCARI |
| | comprises a | | VGYGSGWYGFFDYWGQGTLVTVSSGGGGSGGGGSGGGGSDIQMTQSPSSL |
| | polypeptide | | SASVGDRVTITCRASQGIRNDLGWYQQKPGKAPKRLIYAASTLQSGVPSR |
| | | | FSGSGSGTEFTLTISSLQPEDFATYYCLQHNSYPLTFGCGTKVEIK |
| 730 | Antibody construct | artificial | QVTLKESGPTLVKPTETLTLTCTLSGFSLNNARMGVSWIRQPPGKCLEWL |
| | binding to CD3 and | | AHIFSNDEKSYSTSLKNRLTISKDSSKTQVVLTMTNVDPVDTATYYCARI |
| | FLT3 | | VGYGSGWYGFFDYWGQGTLVTVSSGGGGSGGGGSGGGGSDIQMTQSPSSL |
| | | | SASVGDRVTITCRASQGIRNDLGWYQQKPGKAPKRLIYAASTLQSGVPSR |
| | | | FSGSGSGTEFTLTISSLQPEDFATYYCLQHNSYPLTFGCGTKVEIKSGGG |
| | | | GSEVQLVESGGGLVQPGGSLKLSCAASGFTFNKYAMNWVRQAPGKGLEWV |
| | | | ARIRSKYNNYATYYADSVKDRFTISRDDSKNTAYLQMNNLKTEDTAVYYC |
| | | | VRHGNFGNSYISYWAYWGQGTLVTVSSGGGGSGGGGSGGGGSQTVVTQEP |
| | | | SLTVSPGGTVTLTCGSSTGAVTSGNYPNWVQQKPGQAPRGLIGGTKFLAP |
| | | | GTPARFSGSLLGGKAALTLSGVQPEDEAEYYCVLWYSNRWVFGGGTKLTV |
| | | | L |
| 731 | Flt3 VH-CDR1 | artificial | NARMGVS |
| 732 | Flt3 VH-CDR2 | artificial | NIFSNDEKSYSTSLKS |
| 733 | Flt3 VH-CDR3 | artificial | IVGYGSGWYGYFDY |
| 734 | Flt3 VL-CDR1 | artificial | RASQDIRNDLG |
| 735 | Flt3 VL-CDR2 | artificial | ATSIRQS |
| 736 | Flt3 VL-CDR3 | artificial | LQHNSFPLT |
| 737 | Flt3 VH region | artificial | QVTLKESGPTLVKPTETLTLTCTVSGFSLSNARMGVSWIRQPPGKCLEWL |
| | | | ANIFSNDEKSYSTSLKSRLTISKGTSKSQVVLTMTNVNPVDTGTYYCARI |
| | | | VGYGSGWYGYFDYWGQGTLVTVSS |
| 738 | Flt3 VL region | artificial | DIQMTQSPSSLSASVGDRVTITCRASQDIRNDLGWYQQKPGKAPKRLIYA |
| | | | TSIRQSGVPSRFTGSGSGTEFTLTISGLQPEDFATYFCLQHNSFPLTFGC |
| | | | GTKVEIK |
| 739 | second domain which | artificial | QVTLKESGPTLVKPTETLTLTCTVSGFSLSNARMGVSWIRQPPGKCLEWL |
| | binds to FLT3 | | ANIFSNDEKSYSTSLKSRLTISKGTSKSQVVLTMTNVNPVDTGTYYCARI |
| | comprises a | | VGYGSGWYGYFDYWGQGTLVTVSSGGGGSGGGGSGGGGSDIQMTQSPSSL |
| | polypeptide | | SASVGDRVTITCRASQDIRNDLGWYQQKPGKAPKRLIYATSIRQSGVPSR |
| | | | FTGSGSGTEFTLTISGLQPEDFATYFCLQHNSFPLTFGCGTKVEIK |
| 740 | Antibody construct | artificial | QVTLKESGPTLVKPTETLTLTCTVSGFSLSNARMGVSWIRQPPGKCLEWL |
| | binding to CD3 and | | ANIFSNDEKSYSTSLKSRLTISKGTSKSQVVLTMTNVNPVDTGTYYCARI |
| | FLT3 | | VGYGSGWYGYFDYWGQGTLVTVSSGGGGSGGGGSGGGGSDIQMTQSPSSL |
| | | | SASVGDRVTITCRASQDIRNDLGWYQQKPGKAPKRLIYATSIRQSGVPSR |
| | | | FTGSGSGTEFTLTISGLQPEDFATYFCLQHNSFPLTFGCGTKVEIKSGGG |
| | | | GSEVQLVESGGGLVQPGGSLKLSCAASGFTFNKYAMNWVRQAPGKGLEWV |
| | | | ARIRSKYNNYATYYADSVKDRFTISRDDSKNTAYLQMNNLKTEDTAVYYC |
| | | | VRHGNFGNSYISYWAYWGQGTLVTVSSGGGGSGGGGSGGGGSQTVVTQEP |
| | | | SLTVSPGGTVTLTCGSSTGAVTSGNYPNWVQQKPGQAPRGLIGGTKFLAP |
| | | | GTPARFSGSLLGGKAALTLSGVQPEDEAEYYCVLWYSNRWVFGGGTKLTV |
| | | | L |
| 741 | Flt3 VH-CDR1 | artificial | NARMGVS |
| 742 | Flt3 VH-CDR2 | artificial | HIFSNDEKSFSTSLKN |
| 743 | Flt3 VH-CDR3 | artificial | MVGYGSGWYAYFDY |
| 744 | Flt3 VL-CDR1 | artificial | RASQSISSYLN |
| 745 | Flt3 VL-CDR2 | artificial | AASSLQS |
| 746 | Flt3 VL-CDR3 | artificial | LQHNSYPLT |
| 747 | Flt3 VH region | artificial | QVTLKESGPVLVKPTQTLTLTCTFSGFSLSNARMGVSWIRQPPGKCLEWL |
| | | | AHIFSNDEKSFSTSLKNRLTISKDTSKSQVVLTMTNMDPVDTATYYCARM |
| | | | VGYGSGWYAYFDYWGQGTQVIVSS |
| 748 | Flt3 VL region | artificial | DIQMTQSPSSLSASVGDRVTITCRASQSISSYLNWYQQKPGKAPKLLIYA |
| | | | ASSLQSGVPSRFSGSGSGTDFTLTISSLQPEDFATYYCLQHNSYPLTFGC |
| | | | GTKVEIK |
| 749 | second domain which | artificial | QVTLKESGPVLVKPTQTLTLTCTFSGFSLSNARMGVSWIRQPPGKCLEWL |
| | binds to FLT3 | | AHIFSNDEKSFSTSLKNRLTISKDTSKSQVVLTMTNMDPVDTATYYCARM |
| | comprises a | | VGYGSGWYAYFDYWGQGTQVTVSSGGGGSGGGGSGGGGSDIQMTQSPSSL |
| | polypeptide | | SASVGDRVTITCRASQSISSYLNWYQQKPGKAPKLLIYAASSLQSGVPSR |
| | | | FSGSGSGTDFTLTISSLQPEDFATYYCLQHNSYPLTFGCGTKVEIK |
| 750 | Antibody construct | artificial | QVTLKESGPVLVKPTQTLTLTCTFSGFSLSNARMGVSWIRQPPGKCLEWL |
| | binding to CD3 and | | AHIFSNDEKSFSTSLKNRLTISKDTSKSQVVLTMTNMDPVDTATYYCARM |
| | FLT3 | | VGYGSGWYAYFDYWGQGTQVTVSSGGGGSGGGGSGGGGSDIQMTQSPSSL |
| | | | SASVGDRVTITCRASQSISSYLNWYQQKPGKAPKLLIYAASSLQSGVPSR |
| | | | FSGSGSGTDFTLTISSLQPEDFATYYCLQHNSYPLTFGCGTKVEIKSGGG |
| | | | GSEVQLVESGGGLVQPGGSLKLSCAASGFTFNKYAMNWVRQAPGKGLEWV |
| | | | ARIRSKYNNYATYYADSVKDRFTISRDDSKNTAYLQMNNLKTEDTAVYYC |
| | | | VRHGNFGNSYISYWAYWGQGTLVTVSSGGGGSGGGGSGGGGSQTVVTQEP |
| | | | SLTVSPGGTVTLTCGSSTGAVTSGNYPNWVQQKPGQAPRGLIGGTKFLAP |
| | | | GTPARFSGSLLGGKAALTLSGVQPEDEAEYYCVLWYSNRWVFGGGTKLTV |
| | | | L |
| 751 | Flt3 VH-CDR1 | artificial | NARMAVS |
| 752 | Flt3 VH-CDR2 | artificial | HIFSNDEKSYSTSLKS |
| 753 | Flt3 VH-CDR3 | artificial | IVGYGTGWYGFFDY |
| 754 | Flt3 VL-CDR1 | artificial | RASQGIRNDLA |
| 755 | Flt3 VL-CDR2 | artificial | AASSLQS |
| 756 | Flt3 VL-CDR3 | artificial | LQHNSYPLT |
| 757 | Flt3 VH region | artificial | QVTLKESGPALVKPTETLTLTCTLSGFSLNNARMAVSWIRQPPGKCLEWL |
| | | | AHIFSNDEKSYSTSLKSRLTISKDTSKSQVVLTMTNMDPEDTATYYCARI |
| | | | VGYGTGWYGFFDYWGQGILVTVSS |
| 758 | Flt3 VL region | artificial | DIQMTQSPSSLSASVGDRVTITCRASQGIRNDLAWYQQKPGKAPKRLIYA |
| | | | ASSLQSGVPSRFSGSGSGTEFTLTISSLQPEDFATYYCLQHNSYPLTFGC |
| | | | GTKVEIK |
| 759 | second domain which | artificial | QVTLKESGPALVKPTETLTLTCTLSGFSLNNARMAVSWIRQPPGKCLEWL |
| | binds to FLT3 | | AHIFSNDEKSYSTSLKSRLTISKDTSKSQVVLTMTNMDPEDTATYYCARI |
| | comprises a | | VGYGTGWYGFFDYWGQGILVTVSSGGGGSGGGGSGGGGSDIQMTQSPSSL |
| | polypeptide | | SASVGDRVTITCRASQGIRNDLAWYQQKPGKAPKRLIYAASSLQSGVPSR |
| | | | FSGSGSGTEFTLTISSLQPEDFATYYCLQHNSYPLTFGCGTKVEIK |
| 760 | Antibody construct | artificial | QVTLKESGPALVKPTETLTLTCTLSGFSLNNARMAVSWIRQPPGKCLEWL |
| | binding to CD3 and | | AHIFSNDEKSYSTSLKSRLTISKDTSKSQVVLTMTNMDPEDTATYYCARI |
| | FLT3 | | VGYGTGWYGFFDYWGQGILVTVSSGGGGSGGGGSGGGGSDIQMTQSPSSL |
| | | | SASVGDRVTITCRASQGIRNDLAWYQQKPGKAPKRLIYAASSLQSGVPSR |
| | | | FSGSGSGTEFTLTISSLQPEDFATYYCLQHNSYPLTFGCGTKVEIKSGGG |
| | | | GSEVQLVESGGGLVQPGGSLKLSCAASGFTFNKYAMNWVRQAPGKGLEWV |
| | | | ARIRSKYNNYATYYADSVKDRFTISRDDSKNTAYLQMNNLKTEDTAVYYC |
| | | | VRHGNFGNSYISYWAYWGQGTLVTVSSGGGGSGGGGSGGGGSQTVVTQEP |
| | | | SLTVSPGGTVTLTCGSSTGAVTSGNYPNWVQQKPGQAPRGLIGGTKFLAP |
| | | | GTPARFSGSLLGGKAALTLSGVQPEDEAEYYCVLWYSNRWVFGGGTKLTV |
| | | | L |
| 761 | Flt3 VH-CDR1 | artificial | NARMGVS |
| 762 | Flt3 VH-CDR2 | artificial | HIFSNDEKSYSTSLKS |
| 763 | Flt3 VH-CDR3 | artificial | MPEYSSGWSGAFDI |
| 764 | Flt3 VL-CDR1 | artificial | RASQGIRNDLV |
| 765 | Flt3 VL-CDR2 | artificial | GTSTLQS |
| 766 | Flt3 VL-CDR3 | artificial | LQHNSYPLT |
| 767 | Flt3 VH region | artificial | QVTLKESGPVLVKPTETLTLTCTVSGFSFRNARMGVSWIRQPPGKCLEWL |
| | | | AHIFSNDEKSYSTSLKSRLTISKDTSKSQVVLTLTNMDPVDTATYFCARM |
| | | | PEYSSGWSGAFDIWGQGTMVTVSS |
| 768 | Flt3 VL region | artificial | DIQMTQSPSSLSASVGDRVTITCRASQGIRNDLVWYQQKPGKAPKRLIYG |
| | | | TSTLQSGVPSRFSGSGSGTEFTLTISSLQPEDFATYYCLQHNSYPLTFGC |
| | | | GTKVEIK |
| 769 | second domain which | artificial | QVTLKESGPVLVKPTETLTLTCTVSGFSFRNARMGVSWIRQPPGKCLEWL |
| | binds to FLT3 | | AHIFSNDEKSYSTSLKSRLTISKDTSKSQVVLTLTNMDPVDTATYFCARM |
| | comprises a | | PEYSSGWSGAFDIWGQGTMVTVSSGGGGSGGGGSGGGGSDIQMTQSPSSL |
| | polypeptide | | SASVGDRVTITCRASQGIRNDLVWYQQKPGKAPKRLIYGTSTLQSGVPSR |
| | | | FSGSGSGTEFTLTISSLQPEDFATYYCLQHNSYPLTFGCGTKVEIK |
| 770 | Antibody construct | artificial | QVTLKESGPVLVKPTETLTLTCTVSGFSFRNARMGVSWIRQPPGKCLEWL |
| | binding to CD3 and | | AHIFSNDEKSYSTSLKSRLTISKDTSKSQVVLTLTNMDPVDTATYFCARM |
| | FLT3 | | PEYSSGWSGAFDIWGQGTMVTVSSGGGGSGGGGSGGGGSDIQMTQSPSSL |
| | | | SASVGDRVTITCRASQGIRNDLVWYQQKPGKAPKRLIYGTSTLQSGVPSR |
| | | | FSGSGSGTEFTLTISSLQPEDFATYYCLQHNSYPLTFGCGTKVEIKSGGG |
| | | | GSEVQLVESGGGLVQPGGSLKLSCAASGFTFNKYAMNWVRQAPGKGLEWV |
| | | | ARIRSKYNNYATYYADSVKDRFTISRDDSKNTAYLQMNNLKTEDTAVYYC |
| | | | VRHGNFGNSYISYWAYWGQGTLVTVSSGGGGSGGGGSGGGGSQTVVTQEP |
| | | | SLTVSPGGTVTLTCGSSTGAVTSGNYPNWVQQKPGQAPRGLIGGTKFLAP |
| | | | GTPARFSGSLLGGKAALTLSGVQPEDEAEYYCVLWYSNRWVFGGGTKLTV |
| | | | L |
| 771 | Flt3 VH-CDR1 | artificial | NARMGVS |
| 772 | Flt3 VH-CDR2 | artificial | HIFSNDEKSYSTSLKS |
| 773 | Flt3 VH-CDR3 | artificial | MPEYSSGWSGAFDI |
| 774 | Flt3 VL-CDR1 | artificial | RTSQGIRNDLV |
| 775 | Flt3 VL-CDR2 | artificial | AASTLQS |
| 776 | Flt3 VL-CDR3 | artificial | LQHYSYPLT |
| 777 | Flt3 VH region | artificial | QVTLKESGPVLVKPTETLTLTCTVSGFSFRNARMGVSWIRQPPGKCLEWL |
| | | | AHIFSNDEKSYSTSLKSRLTISKDTSKSQVVLTLTNMDPVDTATYFCARM |
| | | | PEYSSGWSGAFDIWGQGTMVTVSS |
| 778 | Flt3 VL region | artificial | DIQMTQSPSSLSASVGDRVTITCRTSQGIRNDLVWYQQKPGKAPKRLIYA |
| | | | ASTLQSGVPSRFSGSGSGTEFTLTISSLQPEDFATYFCLQHYSYPLTFGC |
| | | | GTKVEIK |
| 779 | second domain which | artificial | QVTLKESGPVLVKPTETLTLTCTVSGFSFRNARMGVSWIRQPPGKCLEWL |
| | binds to FLT3 | | AHIFSNDEKSYSTSLKSRLTISKDTSKSQVVLTLTNMDPVDTATYFCARM |
| | comprises a | | PEYSSGWSGAFDIWGQGTMVTVSSGGGGSGGGGSGGGGSDIQMTQSPSSL |
| | polypeptide | | SASVGDRVTITCRTSQGIRNDLVWYQQKPGKAPKRLIYAASTLQSGVPSR |
| | | | FSGSGSGTEFTLTISSLQPEDFATYFCLQHYSYPLTFGCGTKVEIK |
| 780 | Antibody construct | artificial | QVTLKESGPVLVKPTETLTLTCTVSGFSFRNARMGVSWIRQPPGKCLEWL |
| | binding to CD3 and | | AHIFSNDEKSYSTSLKSRLTISKDTSKSQVVLTLTNMDPVDTATYFCARM |
| | FLT3 | | PEYSSGWSGAFDIWGQGTMVTVSSGGGGSGGGGSGGGGSDIQMTQSPSSL |
| | | | SASVGDRVTITCRTSQGIRNDLVWYQQKPGKAPKRLIYAASTLQSGVPSR |
| | | | FSGSGSGTEFTLTISSLQPEDFATYFCLQHYSYPLTFGCGTKVEIKSGGG |
| | | | GSEVQLVESGGGLVQPGGSLKLSCAASGFTFNKYAMNWVRQAPGKGLEWV |
| | | | ARIRSKYNNYATYYADSVKDRFTISRDDSKNTAYLQMNNLKTEDTAVYYC |
| | | | VRHGNFGNSYISYWAYWGQGTLVTVSSGGGGSGGGGSGGGGSQTVVTQEP |
| | | | SLTVSPGGTVTLTCGSSTGAVTSGNYPNWVQQKPGQAPRGLIGGTKFLAP |
| | | | GTPARFSGSLLGGKAALTLSGVQPEDEAEYYCVLWYSNRWVFGGGTKLTV |
| | | | L |
| 781 | Flt3 VH-CDR1 | artificial | NARMGVS |
| 782 | Flt3 VH-CDR2 | artificial | HIFSNDEKSYRTSLKS |
| 783 | Flt3 VH-CDR3 | artificial | IVGYGSGWYAYFDY |
| 784 | Flt3 VL-CDR1 | artificial | RASQGIRNDLG |
| 785 | Flt3 VL-CDR2 | artificial | AASSLQS |
| 786 | Flt3 VL-CDR3 | artificial | LQHNSYPLT |
| 787 | Flt3 VH region | artificial | QVTLKESGPALVKPTQTLTLTCTFSGFSLSNARMGVSWIRQPPGKCLEWL |
| | | | AHIFSNDEKSYRTSLKSRLTISKDTSKSQVVLTMTNMDPVDTATYYCARI |
| | | | VGYGSGWYAYFDYWGQGTLVTVSS |
| 788 | Flt3 VL region | artificial | DIQMTQSPSSLSASVGDRVTITCRASQGIRNDLGWYQQKPGKAPKRLIYA |
| | | | ASSLQSGVPSRFSGSGSGTEFTLTISSLQPEDFATYYCLQHNSYPLTFGC |
| | | | GTKVEIK |
| 789 | second domain which | artificial | QVTLKESGPALVKPTQTLTLTCTFSGFSLSNARMGVSWIRQPPGKCLEWL |
| | binds to FLT3 | | AHIFSNDEKSYRTSLKSRLTISKDTSKSQVVLTMTNMDPVDTATYYCARI |
| | comprises a | | VGYGSGWYAYFDYWGQGTLVTVSSGGGGSGGGGSGGGGSDIQMTQSPSSL |
| | polypeptide | | SASVGDRVTITCRASQGIRNDLGWYQQKPGKAPKRLIYAASSLQSGVPSR |
| | | | FSGSGSGTEFTLTISSLQPEDFATYYCLQHNSYPLTFGCGTKVEIK |
| 790 | Antibody construct | artificial | QVTLKESGPALVKPTQTLTLTCTFSGFSLSNARMGVSWIRQPPGKCLEWL |
| | binding to CD3 and | | AHIFSNDEKSYRTSLKSRLTISKDTSKSQVVLTMTNMDPVDTATYYCARI |
| | FLT3 | | VGYGSGWYAYFDYWGQGTLVTVSSGGGGSGGGGSGGGGSDIQMTQSPSSL |
| | | | SASVGDRVTITCRASQGIRNDLGWYQQKPGKAPKRLIYAASSLQSGVPSR |
| | | | FSGSGSGTEFTLTISSLQPEDFATYYCLQHNSYPLTFGCGTKVEIKSGGG |
| | | | GSEVQLVESGGGLVQPGGSLKLSCAASGFTFNKYAMNWVRQAPGKGLEWV |
| | | | ARIRSKYNNYATYYADSVKDRFTISRDDSKNTAYLQMNNLKTEDTAVYYC |
| | | | VRHGNFGNSYISYWAYWGQGTLVTVSSGGGGSGGGGSGGGGSQTVVTQEP |
| | | | SLTVSPGGTVTLTCGSSTGAVTSGNYPNWVQQKPGQAPRGLIGGTKFLAP |
| | | | GTPARFSGSLLGGKAALTLSGVQPEDEAEYYCVLWYSNRWVFGGGTKLTV |
| | | | L |
| 791 | Flt3 VH-CDR1 | artificial | NARMGVS |
| 792 | Flt3 VH-CDR2 | artificial | LIYWNDDKRYSPSLKS |
| 793 | Flt3 VH-CDR3 | artificial | MVGYGSGWYAYFDY |
| 794 | Flt3 VL-CDR1 | artificial | RASQGIRNDLG |
| 795 | Flt3 VL-CDR2 | artificial | AASSLQS |
| 796 | Flt3 VL-CDR3 | artificial | LQHNSYPLT |
| 797 | Flt3 VH region | artificial | QVTLKESGPVLVKPTQTLTLTCTFSGFSLSNARMGVSWIRQPPGKCLEWL |
| | | | ALIYWNDDKRYSPSLKSRLTITKDTSKNQVVLTMTNMDPVDTATYYCARM |
| | | | VGYGSGWYAYFDYWGQGTLVTVSS |
| 798 | Flt3 VL region | artificial | DIQMTQSPSSLSASVGDRVTITCRASQGIRNDLGWYQQKPGKAPKRLIYA |
| | | | ASSLQSGVPSRFSGSGSGTEFTLTISSLQPEDFATYYCLQHNSYPLTFGC |
| | | | GTKVEIK |
| 799 | second domain which | artificial | QVTLKESGPVLVKPTQTLTLTCTFSGFSLSNARMGVSWIRQPPGKCLEWL |
| | binds to FLT3 | | ALIYWNDDKRYSPSLKSRLTITKDTSKNQVVLTMTNMDPVDTATYYCARM |
| | comprises a | | VGYGSGWYAYFDYWGQGTLVTVSSGGGGSGGGGSGGGGSDIQMTQSPSSL |
| | polypeptide | | SASVGDRVTITCRASQGIRNDLGWYQQKPGKAPKRLIYAASSLQSGVPSR |
| | | | FSGSGSGTEFTLTISSLQPEDFATYYCLQHNSYPLTFGCGTKVEIK |
| 800 | Antibody construct | artificial | QVTLKESGPVLVKPTQTLTLTCTFSGFSLSNARMGVSWIRQPPGKCLEWL |
| | binding to CD3 and | | ALIYWNDDKRYSPSLKSRLTITKDTSKNQVVLTMTNMDPVDTATYYCARM |
| | FLT3 | | VGYGSGWYAYFDYWGQGTLVTVSSGGGGSGGGGSGGGGSDIQMTQSPSSL |
| | | | SASVGDRVTITCRASQGIRNDLGWYQQKPGKAPKRLIYAASSLQSGVPSR |
| | | | FSGSGSGTEFTLTISSLQPEDFATYYCLQHNSYPLTFGCGTKVEIKSGGG |
| | | | GSEVQLVESGGGLVQPGGSLKLSCAASGFTFNKYAMNWVRQAPGKGLEWV |
| | | | ARIRSKYNNYATYYADSVKDRFTISRDDSKNTAYLQMNNLKTEDTAVYYC |
| | | | VRHGNFGNSYISYWAYWGQGTLVTVSSGGGGSGGGGSGGGGSQTVVTQEP |
| | | | SLTVSPGGTVTLTCGSSTGAVTSGNYPNWVQQKPGQAPRGLIGGTKFLAP |
| | | | GTPARFSGSLLGGKAALTLSGVQPEDEAEYYCVLWYSNRWVFGGGTKLTV |
| | | | L |
| 801 | Flt3 VH-CDR1 | artificial | NARMGVS |
| 802 | Flt3 VH-CDR2 | artificial | HIFSNDEKSYSTSLKS |
| 803 | Flt3 VH-CDR3 | artificial | IVGYGTGWYGFFDY |
| 804 | Flt3 VL-CDR1 | artificial | RTSQGIRNDLG |
| 805 | Flt3 VL-CDR2 | artificial | AASSLQS |
| 806 | Flt3 VL-CDR3 | artificial | LQHNSYPLT |
| 807 | Flt3 VH region | artificial | QVTLKESGPALVKPTQTLTLTCTFSGFSLSNARMGVSWIRQPPGKCLEWL |
| | | | AHIFSNDEKSYSTSLKSRLTISKDTSKSQVVLTMTDMDPEDTATYYCARI |
| | | | VGYGTGWYGFFDYWGQGILVTVSS |
| 808 | Flt3 VL region | artificial | DIQMTQSPSSLSASVGDRVTITCRTSQGIRNDLGWYQQKPGKAPKRLIYA |
| | | | ASSLQSGVPSRFSGSGSGTEFTLTISSLQPEDFATYYCLQHNSYPLTFGC |
| | | | GTKVEIK |
| 809 | second domain which | artificial | QVTLKESGPALVKPTQTLTLTCTFSGFSLSNARMGVSWIRQPPGKCLEWL |
| | binds to FLT3 | | AHIFSNDEKSYSTSLKSRLTISKDTSKSQVVLTMTDMDPEDTATYYCARI |
| | comprises a | | VGYGTGWYGFFDYWGQGILVTVSSGGGGSGGGGSGGGGSDIQMTQSPSSL |
| | polypeptide | | SASVGDRVTITCRTSQGIRNDLGWYQQKPGKAPKRLIYAASSLQSGVPSR |
| | | | FSGSGSGTEFTLTISSLQPEDFATYYCLQHNSYPLTFGCGTKVEIK |
| 810 | Antibody construct | artificial | QVTLKESGPALVKPTQTLTLTCTFSGFSLSNARMGVSWIRQPPGKCLEWL |
| | binding to CD3 and | | AHIFSNDEKSYSTSLKSRLTISKDTSKSQVVLTMTDMDPEDTATYYCARI |
| | FLT3 | | VGYGTGWYGFFDYWGQGILVTVSSGGGGSGGGGSGGGGSDIQMTQSPSSL |
| | | | SASVGDRVTITCRTSQGIRNDLGWYQQKPGKAPKRLIYAASSLQSGVPSR |
| | | | FSGSGSGTEFTLTISSLQPEDFATYYCLQHNSYPLTFGCGTKVEIKSGGG |
| | | | GSEVQLVESGGGLVQPGGSLKLSCAASGFTFNKYAMNWVRQAPGKGLEWV |
| | | | ARIRSKYNNYATYYADSVKDRFTISRDDSKNTAYLQMNNLKTEDTAVYYC |
| | | | VRHGNFGNSYISYWAYWGQGTLVTVSSGGGGSGGGGSGGGGSQTVVTQEP |
| | | | SLTVSPGGTVTLTCGSSTGAVTSGNYPNWVQQKPGQAPRGLIGGTKFLAP |
| | | | GTPARFSGSLLGGKAALTLSGVQPEDEAEYYCVLWYSNRWVFGGGTKLTV |
| | | | L |
| 811 | Flt3 VH-CDR1 | artificial | NARMGVS |
| 812 | Flt3 VH-CDR2 | artificial | HIFWNDEKSYSTSLKS |
| 813 | Flt3 VH-CDR3 | artificial | IPYYGSGSYNYGMDV |
| 814 | Flt3 VL-CDR1 | artificial | RASQGIRNDLG |
| 815 | Flt3 VL-CDR2 | artificial | AASSLQS |
| 816 | Flt3 VL-CDR3 | artificial | LQHNTYPLT |
| 817 | Flt3 VH region | artificial | QVTLKESGPMLVKPTETLTLTCTFSGFSLRNARMGVSWIRQPPGKCLEWL |
| | | | AHIFWNDEKSYSTSLKSRLTISKDTSKSQVVLTMTNMDPVDTATYYCARI |
| | | | PYYGSGSYNYGMDVWGQGTTVTVSS |
| 818 | Flt3 VL region | artificial | DIQMTQSPSSLSASVGDRVTITCRASQGIRNDLGWYQQKPGKAPKRLIYA |
| | | | ASSLQSGVPSRFSGSGSGTEFTLTISSLQPEDFATYYCLQHNTYPLTFGC |
| | | | GTKVDIK |
| 819 | second domain which | artificial | QVTLKESGPMLVKPTETLTLTCTFSGFSLRNARMGVSWIRQPPGKCLEWL |
| | binds to FLT3 | | AHIFWNDEKSYSTSLKSRLTISKDTSKSQVVLTMTNMDPVDTATYYCARI |
| | comprises a | | PYYGSGSYNYGMDVWGQGTTVTVSSGGGGSGGGGSGGGGSDIQMTQSPSS |
| | polypeptide | | LSASVGDRVTITCRASQGIRNDLGWYQQKPGKAPKRLIYAASSLQSGVPS |
| | | | RFSGSGSGTEFTLTISSLQPEDFATYYCLQHNTYPLTFGCGTKVDIK |
| 820 | Antibody construct | artificial | QVTLKESGPMLVKPTETLTLTCTFSGFSLRNARMGVSWIRQPPGKCLEWL |
| | binding to CD3 and | | AHIFWNDEKSYSTSLKSRLTISKDTSKSQVVLTMTNMDPVDTATYYCARI |
| | FLT3 | | PYYGSGSYNYGMDVWGQGTTVTVSSGGGGSGGGGSGGGGSDIQMTQSPSS |
| | | | LSASVGDRVTITCRASQGIRNDLGWYQQKPGKAPKRLIYAASSLQSGVPS |
| | | | RFSGSGSGTEFTLTISSLQPEDFATYYCLQHNTYPLTFGCGTKVDIKSGG |
| | | | GGSEVQLVESGGGLVQPGGSLKLSCAASGFTFNKYAMNWVRQAPGKGLEW |
| | | | VARIRSKYNNYATYYADSVKDRFTISRDDSKNTAYLQMNNLKTEDTAVYY |
| | | | CVRHGNFGNSYISYWAYWGQGTLVTVSSGGGGSGGGGSGGGGSQTVVTQE |
| | | | PSLTVSPGGTVTLTCGSSTGAVTSGNYPNWVQQKPGQAPRGLIGGTKFLA |
| | | | PGTPARFSGSLLGGKAALTLSGVQPEDEAEYYCVLWYSNRWVFGGGTKLT |
| | | | VL |
| 821 | Flt3 VH-CDR1 | artificial | NARMGVS |
| 822 | Flt3 VH-CDR2 | artificial | HIFSNDEKSYSTSLKN |
| 823 | Flt3 VH-CDR3 | artificial | IVGYGTGWFGYFDY |
| 824 | Flt3 VL-CDR1 | artificial | RASQDIRTDLA |
| 825 | Flt3 VL-CDR2 | artificial | AASSLQS |
| 826 | Flt3 VL-CDR3 | artificial | LQHNRYPLT |
| 827 | Flt3 VH region | artificial | QVTLKESGPTLVKPTETLTLTCTVSGFSLNNARMGVSWIRQPPGKCLEWL |
| | | | AHIFSNDEKSYSTSLKNRLTISKDSSKTQVVLTMTNVDPVDTATYYCARI |
| | | | VGYGTGWFGYFDYWGQGTQVTVSS |
| 828 | Flt3 VL region | artificial | DIQMTQSPSSLSASVGDRVTITCRASQDIRTDLAWYQQKPGKAPKRLIYA |
| | | | ASSLQSGVPSRFSGSGSGTEFTLTISSLQPEDFATYYCLQHNRYPLTFGC |
| | | | GTKVDIK |
| 829 | second domain which | artificial | QVTLKESGPTLVKPTETLTLTCTVSGFSLNNARMGVSWIRQPPGKCLEWL |
| | binds to FLT3 | | AHIFSNDEKSYSTSLKNRLTISKDSSKTQVVLTMTNVDPVDTATYYCARI |
| | comprises a | | VGYGTGWFGYFDYWGQGTQVTVSSGGGGSGGGGSGGGGSDIQMTQSPSSL |
| | polypeptide | | SASVGDRVTITCRASQDIRTDLAWYQQKPGKAPKRLIYAASSLQSGVPSR |
| | | | FSGSGSGTEFTLTISSLQPEDFATYYCLQHNRYPLTFGCGTKVDIK |
| 830 | Antibody construct | artificial | QVTLKESGPTLVKPTETLTLTCTVSGFSLNNARMGVSWIRQPPGKCLEWL |
| | binding to CD3 and | | AHIFSNDEKSYSTSLKNRLTISKDSSKTQVVLTMTNVDPVDTATYYCARI |
| | FLT3 | | VGYGTGWFGYFDYWGQGTQVTVSSGGGGSGGGGSGGGGSDIQMTQSPSSL |
| | | | SASVGDRVTITCRASQDIRTDLAWYQQKPGKAPKRLIYAASSLQSGVPSR |
| | | | FSGSGSGTEFTLTISSLQPEDFATYYCLQHNRYPLTFGCGTKVDIKSGGG |
| | | | GSEVQLVESGGGLVQPGGSLKLSCAASGFTFNKYAMNWVRQAPGKGLEWV |
| | | | ARIRSKYNNYATYYADSVKDRFTISRDDSKNTAYLQMNNLKTEDTAVYYC |
| | | | VRHGNFGNSYISYWAYWGQGTLVTVSSGGGGSGGGGSGGGGSQTVVTQEP |
| | | | SLTVSPGGTVTLTCGSSTGAVTSGNYPNWVQQKPGQAPRGLIGGTKFLAP |
| | | | GTPARFSGSLLGGKAALTLSGVQPEDEAEYYCVLWYSNRWVFGGGTKLTV |
| | | | L |
| 831 | Flt3 VH-CDR1 | artificial | NARMGVS |
| 832 | Flt3 VH-CDR2 | artificial | HIFSNDEKSYSTSLKS |
| 833 | Flt3 VH-CDR3 | artificial | IPGYGGNFYYHYYGMDV |
| 834 | Flt3 VL-CDR1 | artificial | RASQGIRNDLA |
| 835 | Flt3 VL-CDR2 | artificial | AASTVQS |
| 836 | Flt3 VL-CDR3 | artificial | LQHNSFPWT |
| 837 | Flt3 VH region | artificial | QVTLKESGPTLVKPTETLTLTCTVSGFSLSNARMGVSWIRQPPGKCLEWL |
| | | | AHIFSNDEKSYSTSLKSRLTISKDTSKSQVVLTMTNMDPVDTATYYCARI |
| | | | PGYGGNFYYHYYGMDVWGQGTTVTVSS |
| 838 | Flt3 VL region | artificial | DIQMTQSPSSLSASVGDRVTITCRASQGIRNDLAWYQQKPGKAPKRLIYA |
| | | | ASTVQSGVPSRFSGSGSGTEFALTISSLQPEDFATYYCLQHNSFPWTFGC |
| | | | GTKVDIK |
| 839 | second domain which | artificial | QVTLKESGPTLVKPTETLTLTCTVSGFSLSNARMGVSWIRQPPGKCLEWL |
| | binds to FLT3 | | AHIFSNDEKSYSTSLKSRLTISKDTSKSQVVLTMTNMDPVDTATYYCARI |
| | comprises a | | PGYGGNFYYHYYGMDVWGQGTTVTVSSGGGGSGGGGSGGGGSDIQMTQSP |
| | polypeptide | | SSLSASVGDRVTITCRASQGIRNDLAWYQQKPGKAPKRLIYAASTVQSGV |
| | | | PSRFSGSGSGTEFALTISSLQPEDFATYYCLQHNSFPWTFGCGTKVDIK |
| 840 | Antibody construct | artificial | QVTLKESGPTLVKPTETLTLTCTVSGFSLSNARMGVSWIRQPPGKCLEWL |
| | binding to CD3 and | | AHIFSNDEKSYSTSLKSRLTISKDTSKSQVVLTMTNMDPVDTATYYCARI |
| | FLT3 | | PGYGGNFYYHYYGMDVWGQGTTVTVSSGGGGSGGGGSGGGGSDIQMTQSP |
| | | | SSLSASVGDRVTITCRASQGIRNDLAWYQQKPGKAPKRLIYAASTVQSGV |
| | | | PSRFSGSGSGTEFALTISSLQPEDFATYYCLQHNSFPWTFGCGTKVDIKS |
| | | | GGGGSEVQLVESGGGLVQPGGSLKLSCAASGFTFNKYAMNWVRQAPGKGL |
| | | | EWVARIRSKYNNYATYYADSVKDRFTISRDDSKNTAYLQMNNLKTEDTAV |
| | | | YYCVRHGNFGNSYISYWAYWGQGTLVTVSSGGGGSGGGGSGGGGSQTVVT |
| | | | QEPSLTVSPGGTVTLTCGSSTGAVTSGNYPNWVQQKPGQAPRGLIGGTKF |
| | | | LAPGTPARFSGSLLGGKAALTLSGVQPEDEAEYYCVLWYSNRWVFGGGTK |
| | | | LTVL |
| 841 | Flt3 VH-CDR1 | artificial | NVRMGVS |
| 842 | Flt3 VH-CDR2 | artificial | HISSNDEKSYSTSLRS |
| 843 | Flt3 VH-CDR3 | artificial | MPGDSNTWRGFFDY |
| 844 | Flt3 VL-CDR1 | artificial | RTSQSVNNNLA |
| 845 | Flt3 VL-CDR2 | artificial | GASTRAT |
| 846 | Flt3 VL-CDR3 | artificial | LQHNSYPLT |
| 847 | Flt3 VH region | artificial | QVTLKESGPTLVKPTETLTLTCTVSGFSLRNVRMGVSWIRQPPGKCLEWL |
| | | | AHISSNDEKSYSTSLRSRLTISTDTSKSQVVLTMTNMDPVDTATYYCARM |
| | | | PGDSNTWRGFFDYWGQGTLVTVSS |
| 848 | Flt3 VL region | artificial | EIVMTQSPATLSVSPGERATLSCRTSQSVNNNLAWYQQKPGQAPRLLIYG |
| | | | ASTRATGIPARFSGSGSGTEFTLTISSLQPEDFATYYCLQHNSYPLTFGC |
| | | | GTKVEIK |
| 849 | second domain which | artificial | QVTLKESGPTLVKPTETLTLTCTVSGFSLRNVRMGVSWIRQPPGKCLEWL |
| | binds to FLT3 | | AHISSNDEKSYSTSLRSRLTISTDTSKSQVVLTMTNMDPVDTATYYCARM |
| | comprises a | | PGDSNTWRGFFDYWGQGTLVTVSSGGGGSGGGGSGGGGSEIVMTQSPATL |
| | polypeptide | | SVSPGERATLSCRTSQSVNNNLAWYQQKPGQAPRLLIYGASTRATGIPAR |
| | | | FSGSGSGTEFTLTISSLQPEDFATYYCLQHNSYPLTFGCGTKVEIK |
| 850 | Antibody construct | artificial | QVTLKESGPTLVKPTETLTLTCTVSGFSLRNVRMGVSWIRQPPGKCLEWL |
| | binding to CD3 and | | AHISSNDEKSYSTSLRSRLTISTDTSKSQVVLTMTNMDPVDTATYYCARM |
| | FLT3 | | PGDSNTWRGFFDYWGQGTLVTVSSGGGGSGGGGSGGGGSEIVMTQSPATL |
| | | | SVSPGERATLSCRTSQSVNNNLAWYQQKPGQAPRLLIYGASTRATGIPAR |
| | | | FSGSGSGTEFTLTISSLQPEDFATYYCLQHNSYPLTFGCGTKVEIKSGGG |
| | | | GSEVQLVESGGGLVQPGGSLKLSCAASGFTFNKYAMNWVRQAPGKGLEWV |
| | | | ARIRSKYNNYATYYADSVKDRFTISRDDSKNTAYLQMNNLKTEDTAVYYC |
| | | | VRHGNFGNSYISYWAYWGQGTLVTVSSGGGGSGGGGSGGGGSQTVVTQEP |
| | | | SLTVSPGGTVTLTCGSSTGAVTSGNYPNWVQQKPGQAPRGLIGGTKFLAP |
| | | | GTPARFSGSLLGGKAALTLSGVQPEDEAEYYCVLWYSNRWVFGGGTKLTV |
| | | | L |
| 851 | Flt3 VH-CDR1 | artificial | YARMGVS |
| 852 | Flt3 VH-CDR2 | artificial | HIFSNDEKSYSTSLKS |
| 853 | Flt3 VH-CDR3 | artificial | MPEYSSGWSGAFDI |
| 854 | Flt3 VL-CDR1 | artificial | RASQDIRNDLA |
| 855 | Flt3 VL-CDR2 | artificial | AASSLQS |
| 856 | Flt3 VL-CDR3 | artificial | LQHNSYPLT |
| 857 | Flt3 VH region | artificial | QVTLKESGPTLVKPTETLTLTCTFSGFSLRYARMGVSWIRQPPGKCLEWL |
| | | | AHIFSNDEKSYSTSLKSRLTISKDTSKSQVVLTLTNMDPVDTATYFCARM |
| | | | PEYSSGWSGAFDIWGQGTMVTVSS |
| 858 | Flt3 VL region | artificial | DIQMTQSPSSLSASVGDRVTITCRASQDIRNDLAWYQQKPGKAPKRLIYA |
| | | | ASSLQSGVPSRFSGSGSGTEFTLTISSLQPEDFATYYCLQHNSYPLTFGC |
| | | | GTKLEIK |
| 859 | second domain which | artificial | QVTLKESGPTLVKPTETLTLTCTFSGFSLRYARMGVSWIRQPPGKCLEWL |
| | binds to FLT3 | | AHIFSNDEKSYSTSLKSRLTISKDTSKSQVVLTLTNMDPVDTATYFCARM |
| | comprises a | | PEYSSGWSGAFDIWGQGTMVTVSSGGGGSGGGGSGGGGSDIQMTQSPSSL |
| | polypeptide | | SASVGDRVTITCRASQDIRNDLAWYQQKPGKAPKRLIYAASSLQSGVPSR |
| | | | FSGSGSGTEFTLTISSLQPEDFATYYCLQHNSYPLTFGCGTKLEIK |
| 860 | Antibody construct | artificial | QVTLKESGPTLVKPTETLTLTCTFSGFSLRYARMGVSWIRQPPGKCLEWL |
| | binding to CD3 and | | AHIFSNDEKSYSTSLKSRLTISKDTSKSQVVLTLTNMDPVDTATYFCARM |
| | FLT3 | | PEYSSGWSGAFDIWGQGTMVTVSSGGGGSGGGGSGGGGSDIQMTQSPSSL |
| | | | SASVGDRVTITCRASQDIRNDLAWYQQKPGKAPKRLIYAASSLQSGVPSR |
| | | | FSGSGSGTEFTLTISSLQPEDFATYYCLQHNSYPLTFGCGTKLEIKSGGG |
| | | | GSEVQLVESGGGLVQPGGSLKLSCAASGFTFNKYAMNWVRQAPGKGLEWV |
| | | | ARIRSKYNNYATYYADSVKDRFTISRDDSKNTAYLQMNNLKTEDTAVYYC |
| | | | VRHGNFGNSYISYWAYWGQGTLVTVSSGGGGSGGGGSGGGGSQTVVTQEP |
| | | | SLTVSPGGTVTLTCGSSTGAVTSGNYPNWVQQKPGQAPRGLIGGTKFLAP |
| | | | GTPARFSGSLLGGKAALTLSGVQPEDEAEYYCVLWYSNRWVFGGGTKLTV |
| | | | L |
| 861 | Flt3 VH-CDR1 | artificial | SYGMH |
| 862 | Flt3 VH-CDR2 | artificial | VISYDGSNEFYADSVKG |
| 863 | Flt3 VH-CDR3 | artificial | GGEITMVRGVIGYYYYGMDV |
| 864 | Flt3 VL-CDR1 | artificial | RTSQSISSYLN |
| 865 | Flt3 VL-CDR2 | artificial | AASSLQS |
| 866 | Flt3 VL-CDR3 | artificial | LQHNSYPLT |
| 867 | Flt3 VH region | artificial | QVQLVESGGGVVQPGRSLRLSCAASGFTFSSYGMHWVRQAPGKCLEWVAV |
| | | | ISYDGSNEFYADSVKGRFTISRDNSKNTLYLQMNSLRAEDTAVYYCARGG |
| | | | EITMVRGVIGYYYYGMDVWGQGTTVTVSS |
| 868 | Flt3 VL region | artificial | DIQMTQSPSSLSASVGDRVTITCRTSQSISSYLNWYQQKPGKAPKLLIYA |
| | | | ASSLQSGVPSRFSGSGSGTEFTLTISSLQPEDFATYYCLQHNSYPLTFGC |
| | | | GTKVDIK |
| 869 | second domain which | artificial | QVQLVESGGGVVQPGRSLRLSCAASGFTFSSYGMHWVRQAPGKCLEWVAV |
| | binds to FLT3 | | ISYDGSNEFYADSVKGRFTISRDNSKNTLYLQMNSLRAEDTAVYYCARGG |
| | comprises a | | EITMVRGVIGYYYYGMDVWGQGTTVTVSSGGGGSGGGGSGGGGSDIQMTQ |
| | polypeptide | | SPSSLSASVGDRVTITCRTSQSISSYLNWYQQKPGKAPKLLIYAASSLQS |
| | | | GVPSRFSGSGSGTEFTLTISSLQPEDFATYYCLQHNSYPLTFGCGTKVDI |
| | | | K |
| 870 | Antibody construct | artificial | QVQLVESGGGVVQPGRSLRLSCAASGFTFSSYGMHWVRQAPGKCLEWVAV |
| | binding to CD3 and | | ISYDGSNEFYADSVKGRFTISRDNSKNTLYLQMNSLRAEDTAVYYCARGG |
| | FLT3 | | EITMVRGVIGYYYYGMDVWGQGTTVTVSSGGGGSGGGGSGGGGSDIQMTQ |
| | | | SPSSLSASVGDRVTITCRTSQSISSYLNWYQQKPGKAPKLLIYAASSLQS |
| | | | GVPSRFSGSGSGTEFTLTISSLQPEDFATYYCLQHNSYPLTFGCGTKVDI |
| | | | KSGGGGSEVQLVESGGGLVQPGGSLKLSCAASGFTFNKYAMNWVRQAPGK |
| | | | GLEWVARIRSKYNNYATYYADSVKDRFTISRDDSKNTAYLQMNNLKTEDT |
| | | | AVYYCVRHGNFGNSYISYWAYWGQGTLVTVSSGGGGSGGGGSGGGGSQTV |
| | | | VTQEPSLTVSPGGTVTLTCGSSTGAVTSGNYPNWVQQKPGQAPRGLIGGT |
| | | | KFLAPGTPARFSGSLLGGKAALTLSGVQPEDEAEYYCVLWYSNRWVFGGG |
| | | | TKLTVL |
| 871 | Flt3 VH-CDR1 | artificial | SYGMH |
| 872 | Flt3 VH-CDR2 | artificial | VISYDGSNEFYADSVKG |
| 873 | Flt3 VH-CDR3 | artificial | GGEITMVRGVIGYYYYGMDV |
| 874 | Flt3 VL-CDR1 | artificial | RASQGVRNNLV |
| 875 | Flt3 VL-CDR2 | artificial | GASTRAT |
| 876 | Flt3 VL-CDR3 | artificial | LQHNSYPLT |
| 877 | Flt3 VH region | artificial | QVQLVESGGGVVQPGRSLRLSCAASGFTFSSYGMHWVRQAPGKCLEWVAV |
| | | | ISYDGSNEFYADSVKGRFTISRDNSKNTLYLQMNSLRAEDTAVYYCARGG |
| | | | EITMVRGVIGYYYYGMDVWGQGTTVTVSS |
| 878 | Flt3 VL region | artificial | EIVMTQSPATLSVSPGERATLSCRASQGVRNNLVWYQQKPGQAPRLLIYG |
| | | | ASTRATGIPARFSGSGSGTEFTLTISSLQSEDFATYYCLQHNSYPLTFGC |
| | | | GTKVEIK |
| 879 | second domain which | artificial | QVQLVESGGGVVQPGRSLRLSCAASGFTFSSYGMHWVRQAPGKCLEWVAV |
| | binds to FLT3 | | ISYDGSNEFYADSVKGRFTISRDNSKNTLYLQMNSLRAEDTAVYYCARGG |
| | comprises a | | EITMVRGVIGYYYYGMDVWGQGTTVTVSSGGGGSGGGGSGGGGSEIVMTQ |
| | polypeptide | | SPATLSVSPGERATLSCRASQGVRNNLVWYQQKPGQAPRLLIYGASTRAT |
| | | | GIPARFSGSGSGTEFTLTISSLQSEDFATYYCLQHNSYPLTFGCGTKVEI |
| | | | K |
| 880 | Antibody construct | artificial | QVQLVESGGGVVQPGRSLRLSCAASGFTFSSYGMHWVRQAPGKCLEWVAV |
| | binding to CD3 and | | ISYDGSNEFYADSVKGRFTISRDNSKNTLYLQMNSLRAEDTAVYYCARGG |
| | FLT3 | | EITMVRGVIGYYYYGMDVWGQGTTVTVSSGGGGSGGGGSGGGGSEIVMTQ |
| | | | SPATLSVSPGERATLSCRASQGVRNNLVWYQQKPGQAPRLLIYGASTRAT |
| | | | GIPARFSGSGSGTEFTLTISSLQSEDFATYYCLQHNSYPLTFGCGTKVEI |
| | | | KSGGGGSEVQLVESGGGLVQPGGSLKLSCAASGFTFNKYAMNWVRQAPGK |
| | | | GLEWVARIRSKYNNYATYYADSVKDRFTISRDDSKNTAYLQMNNLKTEDT |
| | | | AVYYCVRHGNFGNSYISYWAYWGQGTLVTVSSGGGGSGGGGSGGGGSQTV |
| | | | VTQEPSLTVSPGGTVTLTCGSSTGAVTSGNYPNWVQQKPGQAPRGLIGGT |
| | | | KFLAPGTPARFSGSLLGGKAALTLSGVQPEDEAEYYCVLWYSNRWVFGGG |
| | | | TKLTVL |
| 881 | Flt3 VH-CDR1 | artificial | SYGMH |
| 882 | Flt3 VH-CDR2 | artificial | VISYDGSNKYYADSVKG |
| 883 | Flt3 VH-CDR3 | artificial | SYGMDV |
| 884 | Flt3 VL-CDR1 | artificial | RASQGISSWLA |
| 885 | Flt3 VL-CDR2 | artificial | AASSLQS |
| 886 | Flt3 VL-CDR3 | artificial | QQANSFPWT |
| 887 | Flt3 VH region | artificial | QVQLVESGGGVVQPGRSLRLSCAASGFTFSSYGMHWVRQAPGKCLEWVAV |
| | | | ISYDGSNKYYADSVKGRFTISRDNSKNTLYLQMNSLRAEDTAVYYCARSY |
| | | | GMDVWGQGTTVTVSS |
| 888 | Flt3 VL region | artificial | DIQMTQSPSSVSASVGDRVTITCRASQGISSWLAWYQQKPGKAPKLLIYA |
| | | | ASSLQSGVPSRFSGSGSGTDFTLTISSLQPEDFATYYCQQANSFPWTFGC |
| | | | GTKLEIK |
| 889 | second domain which | artificial | QVQLVESGGGVVQPGRSLRLSCAASGFTFSSYGMHWVRQAPGKCLEWVAV |
| | binds to FLT3 | | ISYDGSNKYYADSVKGRFTISRDNSKNTLYLQMNSLRAEDTAVYYCARSY |
| | comprises a | | GMDVWGQGTTVTVSSGGGGSGGGGSGGGGSDIQMTQSPSSVSASVGDRVT |
| | polypeptide | | ITCRASQGISSWLAWYQQKPGKAPKLLIYAASSLQSGVPSRFSGSGSGTD |
| | | | FTLTISSLQPEDFATYYCQQANSFPWTFGCGTKLEIK |
| 890 | Antibody construct | artificial | QVQLVESGGGVVQPGRSLRLSCAASGFTFSSYGMHWVRQAPGKCLEWVAV |
| | binding to CD3 and | | ISYDGSNKYYADSVKGRFTISRDNSKNTLYLQMNSLRAEDTAVYYCARSY |
| | FLT3 | | GMDVWGQGTTVTVSSGGGGSGGGGSGGGGSDIQMTQSPSSVSASVGDRVT |
| | | | ITCRASQGISSWLAWYQQKPGKAPKLLIYAASSLQSGVPSRFSGSGSGTD |
| | | | FTLTISSLQPEDFATYYCQQANSFPWTFGCGTKLEIKSGGGGSEVQLVES |
| | | | GGGLVQPGGSLKLSCAASGFTFNKYAMNWVRQAPGKGLEWVARIRSKYNN |
| | | | YATYYADSVKDRFTISRDDSKNTAYLQMNNLKTEDTAVYYCVRHGNFGNS |
| | | | YISYWAYWGQGTLVTVSSGGGGSGGGGSGGGGSQTVVTQEPSLTVSPGGT |
| | | | VTLTCGSSTGAVTSGNYPNWVQQKPGQAPRGLIGGTKFLAPGTPARFSGS |
| | | | LLGGKAALTLSGVQPEDEAEYYCVLWYSNRWVFGGGTKLTVL |
| 891 | Flt3 VH-CDR1 | artificial | NVRMGVS |
| 892 | Flt3 VH-CDR2 | artificial | HIFSNDEKLYTTSLKS |
| 893 | Flt3 VH-CDR3 | artificial | IVGYGTGWYGYFDY |
| 894 | Flt3 VL-CDR1 | artificial | RASQDIRDDLG |
| 895 | Flt3 VL-CDR2 | artificial | ATSIRQS |
| 896 | Flt3 VL-CDR3 | artificial | LQHHSFPLT |
| 897 | Flt3 VH region | artificial | QVTLKESGPVLVKPTETLTLTCTVSGFSLRNVRMGVSWIRQPPGKALEWL |
| | | | AHIFSNDEKLYTTSLKSRLTISKDTSKSQVVLTMTNMDPEDTATYYCARI |
| | | | VGYGTGWYGYFDYWGQGTQVTVSS |
| 898 | Flt3 VL region | artificial | DIQMTQSPSSLSASIGDRVTITCRASQDIRDDLGWYQREPGKAPKRLIYA |
| | | | TSIRQSGVPSRFSGSGSGTEFTLTISGLQPEDFATYFCLQHHSFPLTFGG |
| | | | GTKVDIK |
| 899 | second domain which | artificial | QVTLKESGPVLVKPTETLTLTCTVSGFSLRNVRMGVSWIRQPPGKALEWL |
| | binds to FLT3 | | AHIFSNDEKLYTTSLKSRLTISKDTSKSQVVLTMTNMDPEDTATYYCARI |
| | comprises a | | VGYGTGWYGYFDYWGQGTQVTVSSGGGGSGGGGSGGGGSDIQMTQSPSSL |
| | polypeptide | | SASIGDRVTITCRASQDIRDDLGWYQREPGKAPKRLIYATSIRQSGVPSR |
| | | | FSGSGSGTEFTLTISGLQPEDFATYFCLQHHSFPLTFGGGTKVDIK |
| 900 | Antibody construct | artificial | QVTLKESGPVLVKPTETLTLTCTVSGFSLRNVRMGVSWIRQPPGKALEWL |
| | binding to CD3 and | | AHIFSNDEKLYTTSLKSRLTISKDTSKSQVVLTMTNMDPEDTATYYCARI |
| | FLT3 | | VGYGTGWYGYFDYWGQGTQVTVSSGGGGSGGGGSGGGGSDIQMTQSPSSL |
| | | | SASIGDRVTITCRASQDIRDDLGWYQREPGKAPKRLIYATSIRQSGVPSR |
| | | | FSGSGSGTEFTLTISGLQPEDFATYFCLQHHSFPLTFGGGTKVDIKSGGG |
| | | | GSEVQLVESGGGLVQPGGSLKLSCAASGFTFNKYAMNWVRQAPGKGLEWV |
| | | | ARIRSKYNNYATYYADSVKDRFTISRDDSKNTAYLQMNNLKTEDTAVYYC |
| | | | VRHGNFGNSYISYWAYWGQGTLVTVSSGGGGSGGGGSGGGGSQTVVTQEP |
| | | | SLTVSPGGTVTLTCGSSTGAVTSGNYPNWVQQKPGQAPRGLIGGTKFLAP |
| | | | GTPARFSGSLLGGKAALTLSGVQPEDEAEYYCVLWYSNRWVFGGGTKLTV |
| | | | L |
| 901 | Flt3 VH-CDR1 | artificial | YARMGVS |
| 902 | Flt3 VH-CDR2 | artificial | HISSNDEKSFSTALES |
| 903 | Flt3 VH-CDR3 | artificial | MPGDSNTWRGFFDY |
| 904 | Flt3 VL-CDR1 | artificial | RTSQTVTNSYIA |
| 905 | Flt3 VL-CDR2 | artificial | GTSTRAT |
| 906 | Flt3 VL-CDR3 | artificial | QKYGSSPLT |
| 907 | Flt3 VH region | artificial | QVTLKESGPTLVKPTETLTLTCTFSGFSLRYARMGVSWIRQPPGKALEWL |
| | | | AHISSNDEKSFSTALESRLTISTDTSKSQMVLTMTNVDPVDTATYYCARM |
| | | | PGDSNTWRGFFDYWGQGTLVTVSS |
| 908 | Flt3 VL region | artificial | EIVMTQSPGTLSLSPGERATLSCRTSQTVTNSYIAWYQQRPGQAPRLLIY |
| | | | GTSTRATGIPDRFSGSGSGTDFTLTISRLEPEDFAVYYCQKYGSSPLTFG |
| | | | GGTKLEIK |
| 909 | second domain which | artificial | QVTLKESGPTLVKPTETLTLTCTFSGFSLRYARMGVSWIRQPPGKALEWL |
| | binds to FLT3 | | AHISSNDEKSFSTALESRLTISTDTSKSQMVLTMTNVDPVDTATYYCARM |
| | comprises a | | PGDSNTWRGFFDYWGQGTLVTVSSGGGGSGGGGSGGGGSEIVMTQSPGTL |
| | polypeptide | | SLSPGERATLSCRTSQTVTNSYIAWYQQRPGQAPRLLIYGTSTRATGIPD |
| | | | RFSGSGSGTDFTLTISRLEPEDFAVYYCQKYGSSPLTFGGGTKLEIK |
| 910 | Antibody construct | artificial | QVTLKESGPTLVKPTETLTLTCTFSGFSLRYARMGVSWIRQPPGKALEWL |
| | binding to CD3 and | | AHISSNDEKSFSTALESRLTISTDTSKSQMVLTMTNVDPVDTATYYCARM |
| | FLT3 | | PGDSNTWRGFFDYWGQGTLVTVSSGGGGSGGGGSGGGGSEIVMTQSPGTL |
| | | | SLSPGERATLSGRTSQTVTNSYIAWYQQRPGQAPRLLIYGTSTRATGIPD |
| | | | RFSGSGSGTDFTLTISRLEPEDFAVYYCQKYGSSPLTFGGGTKLEIKSGG |
| | | | GGSEVQLVESGGGLVQPGGSLKLSCAASGFTFNKYAMNWVRQAPGKGLEW |
| | | | VARIRSKYNNYATYYADSVKDRFTISRDDSKNTAYLQMNNLKTEDTAVYY |
| | | | CVRHGNFGNSYISYWAYWGQGTLVTVSSGGGGSGGGGSGGGGSQTVVTQE |
| | | | PSLTVSPGGTVTLTCGSSTGAVTSGNYPNWVQQKPGQAPRGLIGGTKFLA |
| | | | PGTPARFSGSLLGGKAALTLSGVQPEDEAEYYCVLWYSNRWVFGGGTKLT |
| | | | VL |
| 911 | Flt3 VH-CDR1 | artificial | NVRMGVS |
| 912 | Flt3 VH-CDR2 | artificial | HISSNDEKSYSTSLRS |
| 913 | Flt3 VH-CDR3 | artificial | MPGDSNTWRGFFDY |
| 914 | Flt3 VL-CDR1 | artificial | RTSQSVNNNLA |
| 915 | Flt3 VL-CDR2 | artificial | GASTRAT |
| 916 | Flt3 VL-CDR3 | artificial | LQHNSYPLT |
| 917 | Flt3 VH region | artificial | QVTLKESGPTLVKPTETLTLTCTVSGFSLRNVRMGVSWIRQPPGKALEWL |
| | | | AHISSNDEKSYSTSLRSRLTISTDTSKSQVVLTMTNMDPVDTATYYCARM |
| | | | PGDSNTWRGFFDYWGQGTLVTVSS |
| 918 | Flt3 VL region | artificial | EIVMTQSPATLSVSPGERATLSCRTSQSVNNNLAWYQQKPGQAPRLLIYG |
| | | | ASTRATGIPARFSGSGSGTEFTLTISSLQPEDFATYYCLQHNSYPLTFGG |
| | | | GTKVEIK |
| 919 | second domain which | artificial | QVTLKESGPTLVKPTETLTLTCTVSGFSLRNVRMGVSWIRQPPGKALEWL |
| | binds to FLT3 | | AHISSNDEKSYSTSLRSRLTISTDTSKSQVVLTMTNMDPVDTATYYCARM |
| | comprises a | | PGDSNTWRGFFDYWGQGTLVTVSSGGGGSGGGGSGGGGSEIVMTQSPATL |
| | polypeptide | | SVSPGERATLSCRTSQSVNNNLAWYQQKPGQAPRLLIYGASTRATGIPAR |
| | | | FSGSGSGTEFTLTISSLQPEDFATYYCLQHNSYPLTFGGGTKVEIK |
| 920 | Antibody construct | artificial | QVTLKESGPTLVKPTETLTLTCTVSGFSLRNVRMGVSWIRQPPGKALEWL |
| | binding to CD3 and | | AHISSNDEKSYSTSLRSRLTISTDTSKSQVVLTMTNMDPVDTATYYCARM |
| | FLT3 | | PGDSNTWRGFFDYWGQGTLVTVSSGGGGSGGGGSGGGGSEIVMTQSPATL |
| | | | SVSPGERATLSCRTSQSVNNNLAWYQQKPGQAPRLLIYGASTRATGIPAR |
| | | | FSGSGSGTEFTLTISSLQPEDFATYYCLQHNSYPLTFGGGTKVEIKSGGG |
| | | | GSEVQLVESGGGLVQPGGSLKLSCAASGFTFNKYAMNWVRQAPGKGLEWV |
| | | | ARIRSKYNNYATYYADSVKDRFTISRDDSKNTAYLQMNNLKTEDTAVYYC |
| | | | VRHGNFGNSYISYWAYWGQGTLVTVSSGGGGSGGGGSGGGGSQTVVTQEP |
| | | | SLTVSPGGTVTLTCGSSTGAVTSGNYPNWVQQKPGQAPRGLIGGTKFLAP |
| | | | GTPARFSGSLLGGKAALTLSGVQPEDEAEYYCVLWYSNRWVFGGGTKLTV |
| | | | L |
| 921 | Flt3 VH-CDR1 | artificial | NVRMGVS |
| 922 | Flt3 VH-CDR2 | artificial | HIFSNDEKSYSTSLKS |
| 923 | Flt3 VH-CDR3 | artificial | MPEYSSGWSGAFDI |
| 924 | Flt3 VL-CDR1 | artificial | RASQDIRDDLG |
| 925 | Flt3 VL-CDR2 | artificial | GASTLQS |
| 926 | Flt3 VL-CDR3 | artificial | LQHNSYPLT |
| 927 | Flt3 VH region | artificial | QVTLKESGPMLVKPTETLTLTCTVSGFSLRNVRMGVSWIRQPPGKALEWL |
| | | | AHIFSNDEKSYSTSLKSRLTISKDTSKSQVVLTLTNMDPVDTATYFCARM |
| | | | PEYSSGWSGAFDIWGQGTMVTVSS |
| 928 | Flt3 VL region | artificial | DIQMTQSPSSLSASVGDRVTITCRASQDIRDDLGWYQQKPGNAPKRLIYG |
| | | | ASTLQSGVPSRFSGSGSGTEFTLTISSLQPEDFATYYCLQHNSYPLTFGG |
| | | | GTRLEIK |
| 929 | second domain which | artificial | QVTLKESGPMLVKPTETLTLTCTVSGFSLRNVRMGVSWIRQPPGKALEWL |
| | binds to FLT3 | | AHIFSNDEKSYSTSLKSRLTISKDTSKSQVVLTLTNMDPVDTATYFCARM |
| | comprises a | | PEYSSGWSGAFDIWGQGTMVTVSSGGGGSGGGGSGGGGSDIQMTQSPSSL |
| | polypeptide | | SASVGDRVTITCRASQDIRDDLGWYQQKPGNAPKRLIYGASTLQSGVPSR |
| | | | FSGSGSGTEFTLTISSLQPEDFATYYCLQHNSYPLTFGGGTRLEIK |
| 930 | Antibody construct | artificial | QVTLKESGPMLVKPTETLTLTCTVSGFSLRNVRMGVSWIRQPPGKALEWL |
| | binding to CD3 and | | AHIFSNDEKSYSTSLKSRLTISKDTSKSQVVLTLTNMDPVDTATYFCARM |
| | FLT3 | | PEYSSGWSGAFDIWGQGTMVTVSSGGGGSGGGGSGGGGSDIQMTQSPSSL |
| | | | SASVGDRVTITCRASQDIRDDLGWYQQKPGNAPKRLIYGASTLQSGVPSR |
| | | | FSGSGSGTEFTLTISSLQPEDFATYYCLQHNSYPLTFGGGTRLEIKSGGG |
| | | | GSEVQLVESGGGLVQPGGSLKLSCAASGFTFNKYAMNWVRQAPGKGLEWV |
| | | | ARIRSKYNNYATYYADSVKDRFTISRDDSKNTAYLQMNNLKTEDTAVYYC |
| | | | VRHGNFGNSYISYWAYWGQGTLVTVSSGGGGSGGGGSGGGGSQTVVTQEP |
| | | | SLTVSPGGTVTLTCGSSTGAVTSGNYPNWVQQKPGQAPRGLIGGTKFLAP |
| | | | GTPARFSGSLLGGKAALTLSGVQPEDEAEYYCVLWYSNRWVFGGGTKLTV |
| | | | L |
| 931 | Flt3 VH-CDR1 | artificial | NARMGVS |
| 932 | Flt3 VH-CDR2 | artificial | HIFSNDEKSYSTSLKS |
| 933 | Flt3 VH-CDR3 | artificial | MVGYGSGWYAYFDY |
| 934 | Flt3 VL-CDR1 | artificial | RSSQSLLHSNGYNYLY |
| 935 | Flt3 VL-CDR2 | artificial | EVSNRFS |
| 936 | Flt3 VL-CDR3 | artificial | MQALQTPLT |
| 937 | Flt3 VH region | artificial | QVTLKESGPALVKPTQTLTLTCTFSGFSLSNARMGVSWIRQPPGKALEWL |
| | | | AHIFSNDEKSYSTSLKSRLTISKDTSKRQVVLTMTNMDPVDTATYYCARM |
| | | | VGYGSGWYAYFDYWGQGTLVTVSS |
| 938 | Flt3 VL region | artificial | DIVMTQTPLSLSVTPGQPASISCRSSQSLLHSNGYNYLYWYLQKPGQPPQ |
| | | | LLIYEVSNRFSGVPDRFSGSGSGTDFTLKISRVEAEDVGVYYCMQALQTP |
| | | | LTFGGGTKVEIK |
| 939 | second domain which | artificial | QVTLKESGPALVKPTQTLTLTCTFSGFSLSNARMGVSWIRQPPGKALEWL |
| | binds to FLT3 | | AHIFSNDEKSYSTSLKSRLTISKDTSKRQVVLTMTNMDPVDTATYYCARM |
| | comprises a | | VGYGSGWYAYFDYWGQGTLVTVSSGGGGSGGGGSGGGGSDIVMTQTPLSL |
| | polypeptide | | SVTPGQPASISCRSSQSLLHSNGYNYLYWYLQKPGQPPQLLIYEVSNRFS |
| | | | GVPDRFSGSGSGTDFTLKISRVEAEDVGVYYCMQALQTPLTFGGGTKVEI |
| | | | K |
| 940 | Antibody construct | artificial | QVTLKESGPALVKPTQTLTLTCTFSGFSLSNARMGVSWIRQPPGKALEWL |
| | binding to CD3 and | | AHIFSNDEKSYSTSLKSRLTISKDTSKRQVVLTMTNMDPVDTATYYCARM |
| | FLT3 | | VGYGSGWYAYFDYWGQGTLVTVSSGGGGSGGGGSGGGGSDIVMTQTPLSL |
| | | | SVTPGQPASISCRSSQSLLHSNGYNYLYWYLQKPGQPPQLLIYEVSNRFS |
| | | | GVPDRFSGSGSGTDFTLKISRVEAEDVGVYYCMQALQTPLTFGGGTKVEI |
| | | | KSGGGGSEVQLVESGGGLVQPGGSLKLSCAASGFTFNKYAMNWVRQAPGK |
| | | | GLEWVARIRSKYNNYATYYADSVKDRFTISRDDSKNTAYLQMNNLKTEDT |
| | | | AVYYCVRHGNFGNSYISYWAYWGQGTLVTVSSGGGGSGGGGSGGGGSQTV |
| | | | VTQEPSLTVSPGGTVTLTCGSSTGAVTSGNYPNWVQQKPGQAPRGLIGGT |
| | | | KFLAPGTPARFSGSLLGGKAALTLSGVQPEDEAEYYCVLWYSNRWVFGGG |
| | | | TKLTVL |
| 941 | Flt3 VH-CDR1 | artificial | SYGMH |
| 942 | Flt3 VH-CDR2 | artificial | VISYDGSNEFYADSVKG |
| 943 | Flt3 VH-CDR3 | artificial | GGEITMVRGVIGYYYYGMDV |
| 944 | Flt3 VL-CDR1 | artificial | RASQSISSYLN |
| 945 | Flt3 VL-CDR2 | artificial | AASSLQS |
| 946 | Flt3 VL-CDR3 | artificial | LQHNSYPLT |
| 947 | Flt3 VH region | artificial | QVQLVESGGGVVQPGRSLRLSCAASGFTFSSYGMHWVRQAPGKGLEWVAV |
| | | | ISYDGSNEFYADSVKGRFTISRDNSKNTLYLQMNSLRAEDTAVYYCARGG |
| | | | EITMVRGVIGYYYYGMDVWGQGTTVTVSS |
| 948 | Flt3 VL region | artificial | DIQMTQSPSSLSASVGDRVTITCRASQSISSYLNWYQQKPGKAPKLLIYA |
| | | | ASSLQSGVPSRFSGSGSGTEFTLTISSLQPEDFATYYCLQHNSYPLTFGG |
| | | | GTKVEIK |
| 949 | second domain which | artificial | QVQLVESGGGVVQPGRSLRLSCAASGFTFSSYGMHWVRQAPGKGLEWVAV |
| | binds to FLT3 | | ISYDGSNEFYADSVKGRFTISRDNSKNTLYLQMNSLRAEDTAVYYCARGG |
| | comprises a | | EITMVRGVIGYYYYGMDVWGQGTTVTVSSGGGGSGGGGSGGGGSDIQMTQ |
| | polypeptide | | SPSSLSASVGDRVTITCRASQSISSYLNWYQQKPGKAPKLLIYAASSLQS |
| | | | GVPSRFSGSGSGTEFTLTISSLQPEDFATYYCLQHNSYPLTFGGGTKVEI |
| | | | K |
| 950 | Antibody construct | artificial | QVQLVESGGGVVQPGRSLRLSCAASGFTFSSYGMHWVRQAPGKGLEWVAV |
| | binding to CD3 and | | ISYDGSNEFYADSVKGRFTISRDNSKNTLYLQMNSLRAEDTAVYYCARGG |
| | FLT3 | | EITMVRGVIGYYYYGMDVWGQGTTVTVSSGGGGSGGGGSGGGGSDIQMTQ |
| | | | SPSSLSASVGDRVTITCRASQSISSYLNWYQQKPGKAPKLLIYAASSLQS |
| | | | GVPSRFSGSGSGTEFTLTISSLQPEDFATYYCLQHNSYPLTFGGGTKVEI |
| | | | KSGGGGSEVQLVESGGGLVQPGGSLKLSCAASGFTFNKYAMNWVRQAPGK |
| | | | GLEWVARIRSKYNNYATYYADSVKDRFTISRDDSKNTAYLQMNNLKTEDT |
| | | | AVYYCVRHGNFGNSYISYWAYWGQGTLVTVSSGGGGSGGGGSGGGGSQTV |
| | | | VTQEPSLTVSPGGTVTLTCGSSTGAVTSGNYPNWVQQKPGQAPRGLIGGT |
| | | | KFLAPGTPARFSGSLLGGKAALTLSGVQPEDEAEYYCVLWYSNRWVFGGG |
| | | | TKLTVL |
| 951 | Flt3 VH-CDR1 | artificial | SYGMH |
| 952 | Flt3 VH-CDR2 | artificial | VISYDGSNEFYADSVKG |
| 953 | Flt3 VH-CDR3 | artificial | GGEITMVRGVIGYYYYGMDV |
| 954 | Flt3 VL-CDR1 | artificial | RASQGVRNNLV |
| 955 | Flt3 VL-CDR2 | artificial | GASTRAT |
| 956 | Flt3 VL-CDR3 | artificial | LQHNSYPLT |
| 957 | Flt3 VH region | artificial | QVQLVESGGGVVQPGRSLRLSCAASGFTFSSYGMHWVRQAPGKGLEWVAV |
| | | | ISYDGSNEFYADSVKGRFTISRDNSKNTLYLQMNSLRAEDTAVYYCARGG |
| | | | EITMVRGVIGYYYYGMDVWGQGTTVTVSS |
| 958 | Flt3 VL region | artificial | EIVMTQSPATLSVSPGERATLSCRASQGVRNNLVWYQQKPGQAPRLLIYG |
| | | | ASTRATGIPARFSGSGSGTEFTLTISSLQSEDFATYYCLQHNSYPLTFGG |
| | | | GTKVEIK |
| 959 | second domain which | artificial | QVQLVESGGGVVQPGRSLRLSCAASGFTFSSYGMHWVRQAPGKGLEWVAV |
| | binds to FLT3 | | ISYDGSNEFYADSVKGRFTISRDNSKNTLYLQMNSLRAEDTAVYYCARGG |
| | comprises a | | EITMVRGVIGYYYYGMDVWGQGTTVTVSSGGGGSGGGGSGGGGSEIVMTQ |
| | polypeptide | | SPATLSVSPGERATLSCRASQGVRNNLVWYQQKPGQAPRLLIYGASTRAT |
| | | | GIPARFSGSGSGTEFTLTISSLQSEDFATYYCLQHNSYPLTFGGGTKVEI |
| | | | K |
| 960 | Antibody construct | artificial | QVQLVESGGGVVQPGRSLRLSCAASGFTFSSYGMHWVRQAPGKGLEWVAV |
| | binding to CD3 and | | ISYDGSNEFYADSVKGRFTISRDNSKNTLYLQMNSLRAEDTAVYYCARGG |
| | FLT3 | | EITMVRGVIGYYYYGMDVWGQGTTVTVSSGGGGSGGGGSGGGGSEIVMTQ |
| | | | SPATLSVSPGERATLSCRASQGVRNNLVWYQQKPGQAPRLLIYGASTRAT |
| | | | GIPARFSGSGSGTEFTLTISSLQSEDFATYYCLQHNSYPLTFGGGTKVEI |
| | | | KSGGGGSEVQLVESGGGLVQPGGSLKLSCAASGFTFNKYAMNWVRQAPGK |
| | | | GLEWVARIRSKYNNYATYYADSVKDRFTISRDDSKNTAYLQMNNLKTEDT |
| | | | AVYYCVRHGNFGNSYISYWAYWGQGTLVTVSSGGGGSGGGGSGGGGSQTV |
| | | | VTQEPSLTVSPGGTVTLTCGSSTGAVTSGNYPNWVQQKPGQAPRGLIGGT |
| | | | KFLAPGTPARFSGSLLGGKAALTLSGVQPEDEAEYYCVLWYSNRWVFGGG |
| | | | TKLTVL |
| 961 | Flt3 VH-CDR1 | artificial | SYGMH |
| 962 | Flt3 VH-CDR2 | artificial | VISYDGSNEFYADSVKG |
| 963 | Flt3 VH-CDR3 | artificial | GGEITMVRGVIGYYYYGMDV |
| 964 | Flt3 VL-CDR1 | artificial | RTSQSISSYLN |
| 965 | Flt3 VL-CDR2 | artificial | AASSLQS |
| 966 | Flt3 VL-CDR3 | artificial | LQHNSYPLT |
| 967 | Flt3 VH region | artificial | QVQLVESGGGVVQPGRSLRLSCAASGFTFSSYGMHWVRQAPGKGLEWVAV |
| | | | ISYDGSNEFYADSVKGRFTISRDNSKNTLYLQMNSLRAEDTAVYYCARGG |
| | | | EITMVRGVIGYYYYGMDVWGQGTTVTVSS |
| 968 | Flt3 VL region | artificial | DIQMTQSPSSLSASVGDRVTITCRTSQSISSYLNWYQQKPGKAPKLLIYA |
| | | | ASSLQSGVPSRFSGSGSGTEFTLTISSLQPEDFATYYCLQHNSYPLTFGG |
| | | | GTKVDIK |
| 969 | second domain which | artificial | QVQLVESGGGVVQPGRSLRLSCAASGFTFSSYGMHWVRQAPGKGLEWVAV |
| | binds to FLT3 | | ISYDGSNEFYADSVKGRFTISRDNSKNTLYLQMNSLRAEDTAVYYCARGG |
| | comprises a | | EITMVRGVIGYYYYGMDVWGQGTTVTVSSGGGGSGGGGSGGGGSDIQMTQ |
| | polypeptide | | SPSSLSASVGDRVTITCRTSQSISSYLNWYQQKPGKAPKLLIYAASSLQS |
| | | | GVPSRFSGSGSGTEFTLTISSLQPEDFATYYCLQHNSYPLTFGGGTKVDI |
| | | | K |
| 970 | Antibody construct | artificial | QVQLVESGGGVVQPGRSLRLSCAASGFTFSSYGMHWVRQAPGKGLEWVAV |
| | binding to CD3 and | | ISYDGSNEFYADSVKGRFTISRDNSKNTLYLQMNSLRAEDTAVYYCARGG |
| | FLT3 | | EITMVRGVIGYYYYGMDVWGQGTTVTVSSGGGGSGGGGSGGGGSDIQMTQ |
| | | | SPSSLSASVGDRVTITCRTSQSISSYLNWYQQKPGKAPKLLIYAASSLQS |
| | | | GVPSRFSGSGSGTEFTLTISSLQPEDFATYYCLQHNSYPLTFGGGTKVDI |
| | | | KSGGGGSEVQLVESGGGLVQPGGSLKLSCAASGFTFNKYAMNWVRQAPGK |
| | | | GLEWVARIRSKYNNYATYYADSVKDRFTISRDDSKNTAYLQMNNLKTEDT |
| | | | AVYYCVRHGNFGNSYISYWAYWGQGTLVTVSSGGGGSGGGGSGGGGSQTV |
| | | | VTQEPSLTVSPGGTVTLTCGSSTGAVTSGNYPNWVQQKPGQAPRGLIGGT |
| | | | KFLAPGTPARFSGSLLGGKAALTLSGVQPEDEAEYYCVLWYSNRWVFGGG |
| | | | TKLTVL |
| 971 | Flt3 VH-CDR1 | artificial | SYGMH |
| 972 | Flt3 VH-CDR2 | artificial | VISYDGSNEFYADSVKG |
| 973 | Flt3 VH-CDR3 | artificial | GGEITMVRGVIGYYYYGMDV |
| 974 | Flt3 VL-CDR1 | artificial | RASQSISSYLN |
| 975 | Flt3 VL-CDR2 | artificial | AASSLQS |
| 976 | Flt3 VL-CDR3 | artificial | LQHNSYPLT |
| 977 | Flt3 VH region | artificial | QVQLVESGGGVVQPGRSLRLSCAASGFTFSSYGMHWVRQAPGKGLEWVAV |
| | | | ISYDGSNEFYADSVKGRFTISRDNSKNTLYLQMNSLRAEDTAVYYCARGG |
| | | | EITMVRGVIGYYYYGMDVWGQGTTVTVSS |
| 978 | Flt3 VL region | artificial | DIQMTQSPSSLSASVGNRVTITCRASQSISSYLNWYQQKPGKAPKLLIYA |
| | | | ASSLQSGVPSRFSGSGSGTEFTLTISSLQPEDFATYYCLQHNSYPLTFGG |
| | | | GTKVDIK |
| 979 | second domain which | artificial | QVQLVESGGGVVQPGRSLRLSCAASGFTFSSYGMHWVRQAPGKGLEWVAV |
| | binds to FLT3 | | ISYDGSNEFYADSVKGRFTISRDNSKNTLYLQMNSLRAEDTAVYYCARGG |
| | comprises a | | EITMVRGVIGYYYYGMDVWGQGTTVTVSSGGGGSGGGGSGGGGSDIQMTQ |
| | polypeptide | | SPSSLSASVGNRVTITCRASQSISSYLNWYQQKPGKAPKLLIYAASSLQS |
| | | | GVPSRFSGSGSGTEFTLTISSLQPEDFATYYCLQHNSYPLTFGGGTKVDI |
| | | | K |
| 980 | Antibody construct | artificial | QVQLVESGGGVVQPGRSLRLSCAASGFTFSSYGMHWVRQAPGKGLEWVAV |
| | binding to CD3 and | | ISYDGSNEFYADSVKGRFTISRDNSKNTLYLQMNSLRAEDTAVYYCARGG |
| | FLT3 | | EITMVRGVIGYYYYGMDVWGQGTTVTVSSGGGGSGGGGSGGGGSDIQMTQ |
| | | | SPSSLSASVGNRVTITCRASQSISSYLNWYQQKPGKAPKLLIYAASSLQS |
| | | | GVPSRFSGSGSGTEFTLTISSLQPEDFATYYCLQHNSYPLTFGGGTKVDI |
| | | | KSGGGGSEVQLVESGGGLVQPGGSLKLSCAASGFTFNKYAMNWVRQAPGK |
| | | | GLEWVARIRSKYNNYATYYADSVKDRFTISRDDSKNTAYLQMNNLKTEDT |
| | | | AVYYCVRHGNFGNSYISYWAYWGQGTLVTVSSGGGGSGGGGSGGGGSQTV |
| | | | VTQEPSLTVSPGGTVTLTCGSSTGAVTSGNYPNWVQQKPGQAPRGLIGGT |
| | | | KFLAPGTPARFSGSLLGGKAALTLSGVQPEDEAEYYCVLWYSNRWVFGGG |
| | | | TKLTVL |
| 981 | Flt3 VH-CDR1 | artificial | SYGMH |
| 982 | Flt3 VH-CDR2 | artificial | VISYDGSNKYYADSVKG |
| 983 | Flt3 VH-CDR3 | artificial | SYGMDV |
| 984 | Flt3 VL-CDR1 | artificial | RASQGISSWLA |
| 985 | Flt3 VL-CDR2 | artificial | AASSLQS |
| 986 | Flt3 VL-CDR3 | artificial | QQANSFPWT |
| 987 | Flt3 VH region | artificial | QVQLVESGGGVVQPGRSLRLSCAASGFTFSSYGMHWVRQAPGKGLEWVAV |
| | | | ISYDGSNKYYADSVKGRFTISRDNSKNTLYLQMNSLRAEDTAVYYCARSY |
| | | | GMDVWGQGTTVTVSS |
| 988 | Flt3 VL region | artificial | DIQMTQSPSSVSASVGDRVTITCRASQGISSWLAWYQQKPGKAPKLLIYA |
| | | | ASSLQSGVPSRFSGSGSGTDFTLTISSLQPEDFATYYCQQANSFPWTFGQ |
| | | | GTKLEIK |
| 989 | scFv | artificial | qvqlvesgggvvqpgrslrlscaasgftfssygmhwvrqapgkglewvav |
| | | | isydgsnkyyadsvkgrftisrdnskntlylqmnslraedtavyycarsy |
| | | | gmdvwgqgttvtvssggggsggggsggggsdiqmtqspssvsasvgdrvt |
| | | | itcrasqgisswlawyqqkpgkapklliyaasslqsgvpsrfsgsgsgtd |
| | | | ftltisslqpedfatyycqqansfpwtfgqgtkleik |
| 990 | bispecific | artificial | qvqlvesgggvvqpgrslrlscaasgftfssygmhwvrqapgkglewvav |
| | molecule | | isydgsnkyyadsvkgrftisrdnskntlylqmnslraedtavyycarsy |
| | | | gmdvwgqgttvtvssggggsggggsggggsdiqmtqspssvsasvgdrvt |
| | | | itcrasqgisswlawyqqkpgkapklliyaasslqsgvpsrfsgsgsgtd |
| | | | ftltisslqpedfatyycqqansfpwtfgqgtkleiksggggsevqlves |
| | | | ggglvqpggslklscaasgftfnkyamnwvrqapgkglewvarirskynn |
| | | | yatyyadsvkdrftisrddskntaylqmnnlktedtavyycvrhgnfgns |
| | | | yisywaywgqgtlvtvssggggsggggsggggsqtvvtqepsltvspggt |
| | | | vtitcgsstgavtsgnypnwvqqkpgqaprgliggtkflapgtparfsgs |
| | | | llggkaaltlsgvqpedeaeyycvlwysnrwvfgggtkltvl |
| 991 | hu lsp V5xFlt3 | artificial | NQDLPVIKCVLINHKNNDSSVGKSSSYPMVSESPEDLGCALRPQSSGTVY |
| | E1muxEpC-pEF DHFR | | EA |
| 992 | FLT3 | human | MPALARDGGQLPLLVVFSAMIFGTITNQDLPVIKCVLINHKNNDSSVGKS |
| | | | SSYPMVSESPEDLGCALRPQSSGTVYEAAAVEVDVSASITLQVLVDAPGN |
| | | | ISCLWVFKHSSLNCQPHFDLQNRGVVSMVILKMTETQAGEYLLFIQSEAT |
| | | | NYTILFTVSIRNTLLYTLRRPYFRKMENQDALVCISESVPEPIVEWVLCD |
| | | | SQGESCKEESPAVVKKEEKVLHELFGTDIRCCARNELGRECTRLFTIDLN |
| | | | QTPQTTLPQLFLKVGEPLWIRCKAVHVNHGFGLTWELENKALEEGNYFEM |
| | | | STYSTNRTMIRILFAFVSSVARNDTGYYTCSSSKHPSQSALVTIVEKGFI |
| | | | NATNSSEDYEIDQYEEFCFSVRFKAYPQIRCTWTFSRKSFPCEQKGLDNG |
| | | | YSISKFCNHKHQPGEYIFHAENDDAQFTKMFTLNIRRKPQVLAEASASQA |
| | | | SCFSDGYPLPSWTWKKCSDKSPNCTEEITEGVWNRKANRKVFGQWVSSST |
| | | | LNMSEAIKGFLVKCCAYNSLGTSCETILLNSPGPFPFIQDNISFYATIGV |
| | | | CLLFIVVLTLLICHKYKKQFRYESQLQMVQVTGSSDNEYFYVDFREYEYD |
| | | | LKWEFPRENLEFGKVLGSGAFGKVMNATAYGISKTGVSIQVAVKMLKEKA |
| | | | DSSEREALMSELKMMTQLGSHENIVNLLGACTLSGPIYLIFEYCCYGDLL |
| | | | NYLRSKREKFHRTWTEIFKEHNFSFYPTFQSHPNSSMPGSREVQIHPDSD |
| | | | QISGLHGNSFHSEDEIEYENQKRLEEEEDLNVLTFEDLLCFAYQVAKGME |
| | | | FLEFKSCVHRDLAARNVLVTHGKVVKICDFGLARDIMSDSNYVVRGNARL |
| | | | PVKWMAPESLFEGIYTIKSDVWSYGILLWEIFSLGVNPYPGIPVDANFYK |
| | | | LIQNGFKMDQPFYATEEIYIIMQSCWAFDSRKRPSFPNLTSFLGCQLADA |
| | | | EEAMYQNVDGRVSECPHTYQNRRPFSREMDLGLLSPQAQVEDS |
| 993 | PSMA-UniProt | human | MWNLLHETDSAVATARRPRWLCAGALVLAGGFFLLGFLFGWFIKSSNEAT |
| | entry Q04609 | | NITPKHNMKAFLDELKAENIKKFLYNFTQIPHLAGTEQNFQLAKQIQSQW |
| | | | KEFGLDSVELAHYDVLLSYPNKTHPNYISIINEDGNEIFNTSLFEPPPPG |
| | | | YENVSDIVPPFSAFSPQGMPEGDLVYVNYARTEDFFKLERDMKINCSGKI |
| | | | VIARYGKVFRGNKVKNAQLAGAKGVILYSDPADYFAPGVKSYPDGWNLPG |
| | | | GGVQRGNILNLNGAGDPLTPGYPANEYAYRRGIAEAVGLPSIPVHPIGYY |
| | | | DAQKLLEKMGGSAPPDSSWRGSLKVPYNVGPGFTGNFSTQKVKMHIHSTN |
| | | | EVTRIYNVIGTLRGAVEPDRYVILGGHRDSWVFGGIDPQSGAAVVHEIVR |
| | | | SFGTLKKEGWRPRRTILFASWDAEEFGLLGSTEWAEENSRLLQERGVAYI |
| | | | NADSSIEGNYTLRVDCTPLMYSLVHNLTKELKSPDEGFEGKSLYESWTKK |
| | | | SPSPEFSGMPRISKLGSGNDFEVFFQRLGIASGRARYTKNWETNKFSGYP |
| | | | LYHSVYETYELVEKFYDPMFKYHLTVAQVRGGMVFELANSIVLPFDCRDY |
| | | | AVVLRKYADKIYSISMKHPQEMKTYSVSFDSLFSAVKNFTEIASKFSERL |
| | | | QDFDKSNPIVLRMMNDQLMFLERAFIDPLGLPDRPFYRHVIYAPSSHNKY |
| | | | AGESFPGIYDALFDIESKVDPSKAWGEVKRQIYVAAFTVQAAAETLSEVA |
| 994 | PM 76-B10.17 CC VH | artificial | DYYMY |
| | CDR1 | | |
| 995 | PM 76-B10.17 CC VH | artificial | IISDAGYYTYYSDIIKG |
| | CDR2 | | |
| 996 | PM 76-B10.17 CC VH | artificial | GFPLLRHGAMDY |
| | CDR3 | | |
| 997 | PM 76-B10.17 CC VL | artificial | KASQNVDANVA |
| | CDR1 | | |
| 998 | PM 76-B10.17 CC VL | artificial | SASYVYW |
| | CDR2 | | |
| 999 | PM 76-B10.17 CC VL | artificial | QQYDQQLIT |
| | CDR3 | | |
| 1000 | PM 76-B10.17 CC VH | artificial | QVQLVESGGGLVKPGESLRLSCAASGFTFSDYYMYWVRQAPGKCLEWVAI |
| | | | ISDAGYYTYYSDIIKGRFTISRDNAKNSLYLQMNSLKAEDTAVYYCARGF |
| | | | PLLRHGAMDYWGQGTLVTVSS |
| 1001 | PM 76-B10.17 CC VL | artificial | DIQMTQSPSSLSASVGDRVTITCKASQNVDANVAWYQQKPGQAPKSLIYS |
| | | | ASYVYWDVPSRFSGSASGTDFTLTISSVQSEDFATYYCQQYDQQLITFGC |
| | | | GTKLEIK |
| 1002 | PM 76-B10.17 CC | artificial | QVQLVESGGGLVKPGESLRLSCAASGFTFSDYYMYWVRQAPGKCLEWVAI |
| | SCEV | | ISDAGYYTYYSDIIKGRFTISRDNAKNSLYLQMNSLKAEDTAVYYCARGF |
| | | | PLLRHGAMDYWGQGTLVTVSSGGGGSGGGGSGGGGSDIQMTQSPSSLSAS |
| | | | VGDRVTITCKASQNVDANVAWYQQKPGQAPKSLIYSASYVYWDVPSRFSG |
| | | | SASGTDFTLTISSVQSEDFATYYCQQYDQQLITFGCGTKLEIK |
| 1003 | PM 76-B10.17 CC x | artificial | QVQLVESGGGLVKPGESLRLSCAASGFTFSDYYMYWVRQAPGKCLEWVAI |
| | I2C0 bispecific | | ISDAGYYTYYSDIIKGRFTISRDNAKNSLYLQMNSLKAEDTAVYYCARGF |
| | molecule | | PLLRHGAMDYWGQGTLVTVSSGGGGSGGGGSGGGGSDIQMTQSPSSLSAS |
| | | | VGDRVTITCKASQNVDANVAWYQQKPGQAPKSLIYSASYVYWDVPSRFSG |
| | | | SASGTDFTLTISSVQSEDFATYYCQQYDQQLITFGCGTKLEIKSGGGGSE |
| | | | VQLVESGGGLVQPGGSLKLSCAASGFTFNKYAMNWVRQAPGKGLEWVARI |
| | | | RSKYNNYATYYADSVKDRFTISRDDSKNTAYLQMNNLKTEDTAVYYCVRH |
| | | | GNFGNSYISYWAYWGQGTLVTVSSGGGGSGGGGSGGGGSQTVVTQEPSLT |
| | | | VSPGGTVTLTCGSSTGAVTSGNYPNWVQQKPGQAPRGLIGGTKFLAPGTP |
| | | | ARFSGSLLGGKAALTLSGVQPEDEAEYYCVLWYSNRWVFGGGTKLTVL |
| 1004 | PM 76-B10.17 CC x | artificial | QVQLVESGGGLVKPGESLRLSCAASGFTFSDYYMYWVRQAPGKCLEWVAI |
| | I2C0 scFc | | ISDAGYYTYYSDIIKGRFTISRDNAKNSLYLQMNSLKAEDTAVYYCARGF |
| | bispecific | | PLLRHGAMDYWGQGTLVTVSSGGGGSGGGGSGGGGSDIQMTQSPSSLSAS |
| | HLE molecule | | VGDRVTITCKASQNVDANVAWYQQKPGQAPKSLIYSASYVYWDVPSRFSG |
| | | | SASGTDFTLTISSVQSEDFATYYCQQYDQQLITFGCGTKLEIKSGGGGSE |
| | | | VQLVESGGGLVQPGGSLKLSCAASGFTFNKYAMNWVRQAPGKGLEWVARI |
| | | | RSKYNNYATYYADSVKDRFTISRDDSKNTAYLQMNNLKTEDTAVYYCVRH |
| | | | GNFGNSYISYWAYWGQGTLVTVSSGGGGSGGGGSGGGGSQTVVTQEPSLT |
| | | | VSPGGTVTLTCGSSTGAVTSGNYPNWVQQKPGQAPRGLIGGTKFLAPGTP |
| | | | ARFSGSLLGGKAALTLSGVQPEDEAEYYCVLWYSNRWVFGGGTKLTVLGG |
| | | | GGDKTHTCPPCPAPELLGGPSVFLFPPKPKDTLMISRTPEVTCVVVDVSH |
| | | | EDPEVKFNWYVDGVEVHNAKTKPCEEQYGSTYRCVSVLTVLHQDWLNGKE |
| | | | YKCKVSNKALPAPIEKTISKAKGQPREPQVYTLPPSREEMTKNQVSLTCL |
| | | | VKGFYPSDIAVEWESNGQPENNYKTTPPVLDSDGSFFLYSKLTVDKSRWQ |
| | | | QGNVFSCSVMHEALHNHYTQKSLSLSPGKGGGGSGGGGSGGGGSGGGGSG |
| | | | GGGSGGGGSDKTHTCPPCPAPELLGGPSVFLFPPKPKDTLMISRTPEVTC |
| | | | VVVDVSHEDPEVKFNWYVDGVEVHNAKTKPCEEQYGSTYRCVSVLTVLHQ |
| | | | DWLNGKEYKCKVSNKALPAPIEKTISKAKGQPREPQVYTLPPSREEMTKN |
| | | | QVSLTCLVKGFYPSDIAVEWESNGQPENNYKTTPPVLDSDGSFFLYSKLT |
| | | | VDKSRWQQGNVFSCSVMHEALHNHYTQKSLSLSPGK |
| 1005 | PM 76-B10.17 CC x | artificial | QVQLVESGGGLVKPGESLRLSCAASGFTFSDYYMYWVRQAPGKCLEWVAI |
| | I2C0-scFc_delGK | | ISDAGYYTYYSDIIKGRFTISRDNAKNSLYLQMNSLKAEDTAVYYCARGF |
| | bispecific | | PLLRHGAMDYWGQGTLVTVSSGGGGSGGGGSGGGGSDIQMTQSPSSLSAS |
| | HLE molecule | | VGDRVTITCKASQNVDANVAWYQQKPGQAPKSLIYSASYVYWDVPSRFSG |
| | | | SASGTDFTLTISSVQSEDFATYYCQQYDQQLITFGCGTKLEIKSGGGGSE |
| | | | VQLVESGGGLVQPGGSLKLSCAASGFTFNKYAMNWVRQAPGKGLEWVARI |
| | | | RSKYNNYATYYADSVKDRFTISRDDSKNTAYLQMNNLKTEDTAVYYCVRH |
| | | | GNFGNSYISYWAYWGQGTLVTVSSGGGGSGGGGSGGGGSQTVVTQEPSLT |
| | | | VSPGGTVTLTCGSSTGAVTSGNYPNWVQQKPGQAPRGLIGGTKFLAPGTP |
| | | | ARFSGSLLGGKAALTLSGVQPEDEAEYYCVLWYSNRWVFGGGTKLTVLGG |
| | | | GGDKTHTCPPCPAPELLGGPSVFLFPPKPKDTLMISRTPEVTCVVVDVSH |
| | | | EDPEVKFNWYVDGVEVHNAKTKPCEEQYGSTYRCVSVLTVLHQDWLNGKE |
| | | | YKCKVSNKALPAPIEKTISKAKGQPREPQVYTLPPSREEMTKNQVSLTCL |
| | | | VKGFYPSDIAVEWESNGQPENNYKTTPPVLDSDGSFFLYSKLTVDKSRWQ |
| | | | QGNVFSCSVMHEALHNHYTQKSLSLSPGGGGSGGGGSGGGGSGGGGSGGG |
| | | | GSGGGGSDKTHTCPPCPAPELLGGPSVFLFPPKPKDTLMISRTPEVTCVV |
| | | | VDVSHEDPEVKFNWYVDGVEVHNAKTKPCEEQYGSTYRCVSVLTVLHQDW |
| | | | LNGKEYKCKVSNKALPAPIEKTISKAKGQPREPQVYTLPPSREEMTKNQV |
| | | | SLTCLVKGFYPSDIAVEWESNGQPENNYKTTPPVLDSDGSFFLYSKLTVD |
| | | | KSRWQQGNVFSCSVMHEALHNHYTQKSLSLSPGK |
| 1006 | PM 76-B10.17 CC x | artificial | QVQLVESGGGLVKPGESLRLSCAASGFTFSDYYMYWVRQAPGKCLEWVAI |
| | I2C0 CC (103/43)- | | ISDAGYYTYYSDIIKGRFTISRDNAKNSLYLQMNSLKAEDTAVYYCARGF |
| | scFc bispecific | | PLLRHGAMDYWGQGTLVTVSSGGGGSGGGGSGGGGSDIQMTQSPSSLSAS |
| | molecule | | VGDRVTITCKASQNVDANVAWYQQKPGQAPKSLIYSASYVYWDVPSRFSG |
| | | | SASGTDFTLTISSVQSEDFATYYCQQYDQQLITFGCGTKLEIKSGGGGSE |
| | | | VQLVESGGGLVQPGGSLKLSCAASGFTFNKYAMNWVRQAPGKGLEWVARI |
| | | | RSKYNNYATYYADSVKDRFTISRDDSKNTAYLQMNNLKTEDTAVYYCVRH |
| | | | GNFGNSYISYWAYCGQGTLVTVSSGGGGSGGGGSGGGGSQTVVTQEPSLT |
| | | | VSPGGTVTLTCGSSTGAVTSGNYPNWVQQKPGQCPRGLIGGTKFLAPGTP |
| | | | ARFSGSLLGGKAALTLSGVQPEDEAEYYCVLWYSNRWVFGGGTKLTVL |
| 1007 | PM 76-B10.17 CC x | artificial | QVQLVESGGGLVKPGESLRLSCAASGFTFSDYYMYWVRQAPGKCLEWVAI |
| | I2C0 CC (103/43)- | | ISDAGYYTYYSDIIKGRFTISRDNAKNSLYLQMNSLKAEDTAVYYCARGF |
| | SCFC bispecific | | PLLRHGAMDYWGQGTLVTVSSGGGGSGGGGSGGGGSDIQMTQSPSSLSAS |
| | HLE molecule | | VGDRVTITCKASQNVDANVAWYQQKPGQAPKSLIYSASYVYWDVPSRFSG |
| | | | SASGTDFTLTISSVQSEDFATYYCQQYDQQLITFGCGTKLEIKSGGGGSE |
| | | | VQLVESGGGLVQPGGSLKLSCAASGFTFNKYAMNWVRQAPGKGLEWVARI |
| | | | RSKYNNYATYYADSVKDRFTISRDDSKNTAYLQMNNLKTEDTAVYYCVRH |
| | | | GNFGNSYISYWAYCGQGTLVTVSSGGGGSGGGGSGGGGSQTVVTQEPSLT |
| | | | VSPGGTVTLTCGSSTGAVTSGNYPNWVQQKPGQCPRGLIGGTKFLAPGTP |
| | | | ARFSGSLLGGKAALTLSGVQPEDEAEYYCVLWYSNRWVFGGGTKLTVLGG |
| | | | GGDKTHTCPPCPAPELLGGPSVFLFPPKPKDTLMISRTPEVTCVVVDVSH |
| | | | EDPEVKFNWYVDGVEVHNAKTKPCEEQYGSTYRCVSVLTVLHQDWLNGKE |
| | | | YKCKVSNKALPAPIEKTISKAKGQPREPQVYTLPPSREEMTKNQVSLTCL |
| | | | VKGFYPSDIAVEWESNGQPENNYKTTPPVLDSDGSFFLYSKLTVDKSRWQ |
| | | | QGNVFSCSVMHEALHNHYTQKSLSLSPGKGGGGSGGGGSGGGGSGGGGSG |
| | | | GGGSGGGGSDKTHTCPPCPAPELLGGPSVFLFPPKPKDTLMISRTPEVTC |
| | | | VWDVSHEDPEVKFNWYVDGVEVHNAKTKPCEEQYGSTYRCVSVLTVLHQ |
| | | | DWLNGKEYKCKVSNKALPAPIEKTISKAKGQPREPQVYTLPPSREEMTKN |
| | | | QVSLTCLVKGFYPSDIAVEWESNGQPENNYKTTPPVLDSDGSFFLYSKLT |
| | | | VDKSRWQQGNVFSCSVMHEALHNHYTQKSLSLSPGK |
| 1008 | PM 76-B10.17 CC x | artificial | QVQLVESGGGLVKPGESLRLSCAASGFTFSDYYMYWVRQAPGKCLEWVAI |
| | I2C0 CC (103/43)- | | ISDAGYYTYYSDIIKGRFTISRDNAKNSLYLQMNSLKAEDTAVYYCARGF |
| | scFc delGK | | PLLRHGAMDYWGQGTLVTVSSGGGGSGGGGSGGGGSDIQMTQSPSSLSAS |
| | bispecific | | VGDRVTITCKASQNVDANVAWYQQKPGQAPKSLIYSASYVYWDVPSRFSG |
| | HLE molecule | | SASGTDFTLTISSVQSEDFATYYCQQYDQQLITFGCGTKLEIKSGGGGSE |
| | | | VQLVESGGGLVQPGGSLKLSCAASGFTFNKYAMNWVRQAPGKGLEWVARI |
| | | | RSKYNNYATYYADSVKDRFTISRDDSKNTAYLQMNNLKTEDTAVYYCVRH |
| | | | GNFGNSYISYWAYCGQGTLVTVSSGGGGSGGGGSGGGGSQTVVTQEPSLT |
| | | | VSPGGTVTLTCGSSTGAVTSGNYPNWVQQKPGQCPRGLIGGTKFLAPGTP |
| | | | ARFSGSLLGGKAALTLSGVQPEDEAEYYCVLWYSNRWVFGGGTKLTVLGG |
| | | | GGDKTHTCPPCPAPELLGGPSVFLFPPKPKDTLMISRTPEVTCVVVDVSH |
| | | | EDPEVKFNWYVDGVEVHNAKTKPCEEQYGSTYRCVSVLTVLHQDWLNGKE |
| | | | YKCKVSNKALPAPIEKTISKAKGQPREPQVYTLPPSREEMTKNQVSLTCL |
| | | | VKGFYPSDIAVEWESNGQPENNYKTTPPVLDSDGSFFLYSKLTVDKSRWQ |
| | | | QGNVFSCSVMHEALHNHYTQKSLSLSPGGGGSGGGGSGGGGSGGGGSGGG |
| | | | GSGGGGSDKTHTCPPCPAPELLGGPSVFLFPPKPKDTLMISRTPEVTCVV |
| | | | VDVSHEDPEVKFNWYVDGVEVHNAKTKPCEEQYGSTYRCVSVLTVLHQDW |
| | | | LNGKEYKCKVSNKALPAPIEKTISKAKGQPREPQVYTLPPSREEMTKNQV |
| | | | SLTCLVKGFYPSDIAVEWESNGQPENNYKTTPPVLDSDGSFFLYSKLTVD |
| | | | KSRWQQGNVFSCSVMHEALHNHYTQKSLSLSPGK |
| 1009 | PM 76-B10.11 CC VH | artificial | DYYMY |
| | CDR1 | | |
| 1010 | PM 76-B10.11 CC VH | artificial | IISDGGYYTYYSDIIKG |
| | CDR2 | | |
| 1011 | PM 76-B10.11 CC VH | artificial | GFPLLRHGAMDY |
| | CDR3 | | |
| 1012 | PM 76-B10.11 CC VL | artificial | KASQNVDTNVA |
| | CDR1 | | |
| 1013 | PM 76-B10.11 CC VL | artificial | SASYVYW |
| | CDR2 | | |
| 1014 | PM 76-B10.11 CC VL | artificial | QQYDQQLIT |
| | CDR3 | | |
| 1015 | PM 76-B10.11 CC VH | artificial | QVQLVESGGGLVKPGESLRLSCAASGFTFSDYYMYWVRQAPGKGLEWVAI |
| | | | ISDGGYYTYYSDIIKGRFTISRDNAKNSLYLQMNSLKAEDTAVYYCARGE |
| | | | PLLRHGAMDYWGQGTLVTVSS |
| 1016 | PM 76-B10.11 CC VL | artificial | DIQMTQSPSSLSASVGDRVTITCKASQNVDTNVAWYQQKPGQAPKSLIYS |
| | | | ASYVYWDVPSRFSGSASGTDFTLTISSVQSEDFATYYCQQYDQQLITFGG |
| | | | GTKLEIK |
| 1017 | PM 76-B10.11 CC | artificial | QVQLVESGGGLVKPGESLRLSCAASGFTFSDYYMYWVRQAPGKGLEWVAI |
| | scFv | | ISDGGYYTYYSDIIKGRFTISRDNAKNSLYLQMNSLKAEDTAVYYCARGF |
| | | | PLLRHGAMDYWGQGTLVTVSSGGGGSGGGGSGGGGSDIQMTQSPSSLSAS |
| | | | VGDRVTITCKASQNVDTNVAWYQQKPGQAPKSLIYSASYVYWDVPSRFSG |
| | | | SASGTDFTLTISSVQSEDFATYYCQQYDQQLITFGGGTKLEIK |
| 1018 | PM 76-B10.11 CC x | artificial | QVQLVESGGGLVKPGESLRLSCAASGFTFSDYYMYWVRQAPGKGLEWVAI |
| | I2C0 bispecific | | ISDGGYYTYYSDIIKGRFTISRDNAKNSLYLQMNSLKAEDTAVYYCARGF |
| | molecule | | PLLRHGAMDYWGQGTLVTVSSGGGGSGGGGSGGGGSDIQMTQSPSSLSAS |
| | | | VGDRVTITCKASQNVDTNVAWYQQKPGQAPKSLIYSASYVYWDVPSRFSG |
| | | | SASGTDFTLTISSVQSEDFATYYCQQYDQQLITFGGGTKLEIKSGGGGSE |
| | | | VQLVESGGGLVQPGGSLKLSCAASGFTFNKYAMNWVRQAPGKGLEWVARI |
| | | | RSKYNNYATYYADSVKDRFTISRDDSKNTAYLQMNNLKTEDTAVYYCVRH |
| | | | GNFGNSYISYWAYWGQGTLVTVSSGGGGSGGGGSGGGGSQTVVTQEPSLT |
| | | | VSPGGTVTLTCGSSTGAVTSGNYPNWVQQKPGQAPRGLIGGTKFLAPGTP |
| | | | ARFSGSLLGGKAALTLSGVQPEDEAEYYCVLWYSNRWVFGGGTKLTVL |
| 1019 | PM 76-B10.11 CC x | artificial | QVQLVESGGGLVKPGESLRLSCAASGFTFSDYYMYWVRQAPGKGLEWVAI |
| | I2C0-scFc | | ISDGGYYTYYSDIIKGRFTISRDNAKNSLYLQMNSLKAEDTAVYYCARGF |
| | bispecific | | PLLRHGAMDYWGQGTLVTVSSGGGGSGGGGSGGGGSDIQMTQSPSSLSAS |
| | HLE molecule | | VGDRVTITCKASQNVDTNVAWYQQKPGQAPKSLIYSASYVYWDVPSRFSG |
| | | | SASGTDFTLTISSVQSEDFATYYCQQYDQQLITFGGGTKLEIKSGGGGSE |
| | | | VQLVESGGGLVQPGGSLKLSCAASGFTFNKYAMNWVRQAPGKGLEWVARI |
| | | | RSKYNNYATYYADSVKDRFTISRDDSKNTAYLQMNNLKTEDTAVYYCVRH |
| | | | GNFGNSYISYWAYWGQGTLVTVSSGGGGSGGGGSGGGGSQTVVTQEPSLT |
| | | | VSPGGTVTLTCGSSTGAVTSGNYPNWVQQKPGQAPRGLIGGTKFLAPGTP |
| | | | ARFSGSLLGGKAALTLSGVQPEDEAEYYCVLWYSNRWVFGGGTKLTVLGG |
| | | | GGDKTHTCPPCPAPELLGGPSVFLFPPKPKDTLMISRTPEVTCVVVDVSH |
| | | | EDPEVKFNWYVDGVEVHNAKTKPCEEQYGSTYRCVSVLTVLHQDWLNGKE |
| | | | YKCKVSNKALPAPIEKTISKAKGQPREPQVYTLPPSREEMTKNQVSLTCL |
| | | | VKGFYPSDIAVEWESNGQPENNYKTTPPVLDSDGSFFLYSKLTVDKSRWQ |
| | | | QGNVFSCSVMHEALHNHYTQKSLSLSPGKGGGGSGGGGSGGGGSGGGGSG |
| | | | GGGSGGGGSDKTHTCPPCPAPELLGGPSVFLFPPKPKDTLMISRTPEVTC |
| | | | VVVDVSHEDPEVKFNWYVDGVEVHNAKTKPCEEQYGSTYRCVSVLTVLHQ |
| | | | DWLNGKEYKCKVSNKALPAPIEKTISKAKGQPREPQVYTLPPSREEMTKN |
| | | | QVSLTCLVKGFYPSDIAVEWESNGQPENNYKTTPPVLDSDGSFFLYSKLT |
| | | | VDKSRWQQGNVFSCSVMHEALHNHYTQKSLSLSPGK |
| 1020 | PM 76-B10.11 CC x | artificial | QVQLVESGGGLVKPGESLRLSCAASGFTFSDYYMYWVRQAPGKGLEWVAI |
| | I2C0-scFc_delGK | | ISDGGYYTYYSDIIKGRFTISRDNAKNSLYLQMNSLKAEDTAVYYCARGF |
| | bispecific | | PLLRHGAMDYWGQGTLVTVSSGGGGSGGGGSGGGGSDIQMTQSPSSLSAS |
| | HLE molecule | | VGDRVTITCKASQNVDTNVAWYQQKPGQAPKSLIYSASYVYWDVPSRFSG |
| | | | SASGTDFTLTISSVQSEDFATYYCQQYDQQLITFGGGTKLEIKSGGGGSE |
| | | | VQLVESGGGLVQPGGSLKLSCAASGFTFNKYAMNWVRQAPGKGLEWVARI |
| | | | RSKYNNYATYYADSVKDRFTISRDDSKNTAYLQMNNLKTEDTAVYYCVRH |
| | | | GNFGNSYISYWAYWGQGTLVTVSSGGGGSGGGGSGGGGSQTVVTQEPSLT |
| | | | VSPGGTVTLTCGSSTGAVTSGNYPNWVQQKPGQAPRGLIGGTKFLAPGTP |
| | | | ARFSGSLLGGKAALTLSGVQPEDEAEYYCVLWYSNRWVFGGGTKLTVLGG |
| | | | GGDKTHTCPPCPAPELLGGPSVFLFPPKPKDTLMISRTPEVTCVVVDVSH |
| | | | EDPEVKFNWYVDGVEVHNAKTKPCEEQYGSTYRCVSVLTVLHQDWLNGKE |
| | | | YKCKVSNKALPAPIEKTISKAKGQPREPQVYTLPPSREEMTKNQVSLTCL |
| | | | VKGFYPSDIAVEWESNGQPENNYKTTPPVLDSDGSFFLYSKLTVDKSRWQ |
| | | | QGNVFSCSVMHEALHNHYTQKSLSLSPGGGGSGGGGSGGGGSGGGGSGGG |
| | | | GSGGGGSDKTHTCPPCPAPELLGGPSVFLFPPKPKDTLMISRTPEVTCVV |
| | | | VDVSHEDPEVKFNWYVDGVEVHNAKTKPCEEQYGSTYRCVSVLTVLHQDW |
| | | | LNGKEYKCKVSNKALPAPIEKTISKAKGQPREPQVYTLPPSREEMTKNQV |
| | | | SLTCLVKGFYPSDIAVEWESNGQPENNYKTTPPVLDSDGSFFLYSKLTVD |
| | | | KSRWQQGNVFSCSVMHEALHNHYTQKSLSLSPGK |
| 1021 | PM 76-B10.11 CC x | artificial | QVQLVESGGGLVKPGESLRLSCAASGFTFSDYYMYWVRQAPGKGLEWVAI |
| | I2C0 CC (103/43)- | | ISDGGYYTYYSDIIKGRFTISRDNAKNSLYLQMNSLKAEDTAVYYCARGF |
| | scFc bispecific | | PLLRHGAMDYWGQGTLVTVSSGGGGSGGGGSGGGGSDIQMTQSPSSLSAS |
| | molecule | | VGDRVTITCKASQNVDTNVAWYQQKPGQAPKSLIYSASYVYWDVPSRFSG |
| | | | SASGTDFTLTISSVQSEDFATYYCQQYDQQLITFGGGTKLEIKSGGGGSE |
| | | | VQLVESGGGLVQPGGSLKLSCAASGFTFNKYAMNWVRQAPGKGLEWVARI |
| | | | RSKYNNYATYYADSVKDRFTISRDDSKNTAYLQMNNLKTEDTAVYYCVRH |
| | | | GNFGNSYISYWAYCGQGTLVTVSSGGGGSGGGGSGGGGSQTVVTQEPSLT |
| | | | VSPGGTVTLTCGSSTGAVTSGNYPNWVQQKPGQCPRGLIGGTKFLAPGTP |
| | | | ARFSGSLLGGKAALTLSGVQPEDEAEYYCVLWYSNRWVFGGGTKLTVL |
| 1022 | PM 76-B10.11 CC x | artificial | QVQLVESGGGLVKPGESLRLSCAASGFTFSDYYMYWVRQAPGKGLEWVAI |
| | I2C0 CC (103/43)- | | ISDGGYYTYYSDIIKGRFTISRDNAKNSLYLQMNSLKAEDTAVYYCARGF |
| | scFc bispecific | | PLLRHGAMDYWGQGTLVTVSSGGGGSGGGGSGGGGSDIQMTQSPSSLSAS |
| | HLE molecule | | VGDRVTITCKASQNVDTNVAWYQQKPGQAPKSLIYSASYVYWDVPSRFSG |
| | | | SASGTDFTLTISSVQSEDFATYYCQQYDQQLITFGGGTKLEIKSGGGGSE |
| | | | VQLVESGGGLVQPGGSLKLSCAASGFTFNKYAMNWVRQAPGKGLEWVARI |
| | | | RSKYNNYATYYADSVKDRFTISRDDSKNTAYLQMNNLKTEDTAVYYCVRH |
| | | | GNFGNSYISYWAYCGQGTLVTVSSGGGGSGGGGSGGGGSQTVVTQEPSLT |
| | | | VSPGGTVTLTCGSSTGAVTSGNYPNWVQQKPGQCPRGLIGGTKFLAPGTP |
| | | | ARFSGSLLGGKAALTLSGVQPEDEAEYYCVLWYSNRWVFGGGTKLTVLGG |
| | | | GGDKTHTCPPCPAPELLGGPSVFLFPPKPKDTLMISRTPEVTCVVVDVSH |
| | | | EDPEVKFNWYVDGVEVHNAKTKPCEEQYGSTYRCVSVLTVLHQDWLNGKE |
| | | | YKCKVSNKALPAPIEKTISKAKGQPREPQVYTLPPSREEMTKNQVSLTCL |
| | | | VKGFYPSDIAVEWESNGQPENNYKTTPPVLDSDGSFFLYSKLTVDKSRWQ |
| | | | QGNVFSCSVMHEALHNHYTQKSLSLSPGKGGGGSGGGGSGGGGSGGGGSG |
| | | | GGGSGGGGSDKTHTCPPCPAPELLGGPSVFLFPPKPKDTLMISRTPEVTC |
| | | | VVVDVSHEDPEVKFNWYVDGVEVHNAKTKPCEEQYGSTYRCVSVLTVLHQ |
| | | | DWLNGKEYKCKVSNKALPAPIEKTISKAKGQPREPQVYTLPPSREEMTKN |
| | | | QVSLTCLVKGFYPSDIAVEWESNGQPENNYKTTPPVLDSDGSFFLYSKLT |
| | | | VDKSRWQQGNVFSCSVMHEALHNHYTQKSLSLSPGK |
| 1023 | PM 76-B10.11 CC x | artificial | QVQLVESGGGLVKPGESLRLSCAASGFTFSDYYMYWVRQAPGKGLEWVAI |
| | I2C0 CC (103/43)- | | ISDGGYYTYYSDIIKGRFTISRDNAKNSLYLQMNSLKAEDTAVYYCARGF |
| | scFc delGK | | PLLRHGAMDYWGQGTLVTVSSGGGGSGGGGSGGGGSDIQMTQSPSSLSAS |
| | bispecific | | VGDRVTITCKASQNVDTNVAWYQQKPGQAPKSLIYSASYVYWDVPSRFSG |
| | HLE molecule | | SASGTDFTLTISSVQSEDFATYYCQQYDQQLITFGGGTKLEIKSGGGGSE |
| | | | VQLVESGGGLVQPGGSLKLSCAASGFTFNKYAMNWVRQAPGKGLEWVARI |
| | | | RSKYNNYATYYADSVKDRFTISRDDSKNTAYLQMNNLKTEDTAVYYCVRH |
| | | | GNFGNSYISYWAYCGQGTLVTVSSGGGGSGGGGSGGGGSQTVVTQEPSLT |
| | | | VSPGGTVTLTCGSSTGAVTSGNYPNWVQQKPGQCPRGLIGGTKFLAPGTP |
| | | | ARFSGSLLGGKAALTLSGVQPEDEAEYYCVLWYSNRWVFGGGTKLTVLGG |
| | | | GGDKTHTCPPCPAPELLGGPSVFLFPPKPKDTLMISRTPEVTCVVVDVSH |
| | | | EDPEVKFNWYVDGVEVHNAKTKPCEEQYGSTYRCVSVLTVLHQDWLNGKE |
| | | | YKCKVSNKALPAPIEKTISKAKGQPREPQVYTLPPSREEMTKNQVSLTCL |
| | | | VKGFYPSDIAVEWESNGQPENNYKTTPPVLDSDGSFFLYSKLTVDKSRWQ |
| | | | QGNVFSCSVMHEALHNHYTQKSLSLSPGGGGSGGGGSGGGGSGGGGSGGG |
| | | | GSGGGGSDKTHTCPPCPAPELLGGPSVFLFPPKPKDTLMISRTPEVTCVV |
| | | | VDVSHEDPEVKFNWYVDGVEVHNAKTKPCEEQYGSTYRCVSVLTVLHQDW |
| | | | LNGKEYKCKVSNKALPAPIEKTISKAKGQPREPQVYTLPPSREEMTKNQV |
| | | | SLTCLVKGFYPSDIAVEWESNGQPENNYKTTPPVLDSDGSFFLYSKLTVD |
| | | | KSRWQQGNVFSCSVMHEALHNHYTQKSLSLSPGK |
| 1024 | PM 76-B10.11 CC x | artificial | DYYMY |
| | I2C0-scFc VH CDR1 | | |
| 1025 | PM 76-B10.11 CC x | artificial | IISDGGYYTYYSDIIKG |
| | I2C0-scFc VH CDR2 | | |
| 1026 | PM 76-B10.11 CC x | artificial | GFPLLRHGAMDY |
| | I2C0 scFc VH CDR3 | | |
| 1027 | PM 76-B10.11 CC x | artificial | KASQNVDTNVA |
| | I2C0-scFc VL CDR1 | | |
| 1028 | PM 76-B10.11 CC x | artificial | SASYVYW |
| | I2C0-scFc VL CDR2 | | |
| 1029 | PM 76-B10.11 CC x | artificial | QQYDQQLIT |
| | I2C0-scFc VL CDR3 | | |
| 1030 | PM 76-B10.11 CC x | artificial | QVQLVESGGGLVKPGESLRLSCAASGFTFSDYYMYWVRQAPGKCLEWVAI |
| | I2C0-scFc VH | | ISDGGYYTYYSDIIKGRFTISRDNAKNSLYLQMNSLKAEDTAVYYCARGF |
| | | | PLLRHGAMDYWGQGTLVTVSS |
| 1031 | PM 76-B10.11 CC x | artificial | DIQMTQSPSSLSASVGDRVTITCKASQNVDTNVAWYQQKPGQAPKSLIYS |
| | I2C0-scFc VL | | ASYVYWDVPSRFSGSASGTDFTLTISSVQSEDFATYYCQQYDQQLITFGC |
| | | | GTKLEIK |
| 1032 | PM 76-B10.11 CC x | artificial | QVQLVESGGGLVKPGESLRLSCAASGFTFSDYYMYWVRQAPGKCLEWVAI |
| | I2C0-scFc scFv | | ISDGGYYTYYSDIIKGRFTISRDNAKNSLYLQMNSLKAEDTAVYYCARGF |
| | | | PLLRHGAMDYWGQGTLVTVSSGGGGSGGGGSGGGGSDIQMTQSPSSLSAS |
| | | | VGDRVTITCKASQNVDTNVAWYOQKPGQAPKSLIYSASYVYWDVPSRFSG |
| | | | SASGTDFTLTISSVQSEDFATYYCQQYDQQLITFGCGTKLEIK |
| 1033 | PM 76-B10.11 CC x | artificial | QVQLVESGGGLVKPGESLRLSCAASGFTFSDYYMYWVRQAPGKCLEWVAI |
| | I2C0-scFc | | ISDGGYYTYYSDIIKGRFTISRDNAKNSLYLQMNSLKAEDTAVYYCARGF |
| | bispecific molecule | | PLLRHGAMDYWGQGTLVTVSSGGGGSGGGGSGGGGSDIQMTQSPSSLSAS |
| | | | VGDRVTITCKASQNVDTNVAWYQQKPGQAPKSLIYSASYVYWDVPSRFSG |
| | | | SASGTDFTLTISSVQSEDFATYYCQQYDQQLITFGCGTKLEIKSGGGGSE |
| | | | VQLVESGGGLVQPGGSLKLSCAASGFTFNKYAMNWVRQAPGKGLEWVARI |
| | | | RSKYNNYATYYADSVKDRFTISRDDSKNTAYLQMNNLKTEDTAVYYCVRH |
| | | | GNFGNSYISYWAYWGQGTLVTVSSGGGGSGGGGSGGGGSQTVVTQEPSLT |
| | | | VSPGGTVTLTCGSSTGAVTSGNYPNWVQQKPGQAPRGLIGGTKFLAPGTP |
| | | | ARFSGSLLGGKAALTLSGVQPEDEAEYYCVLWYSNRWVFGGGTKLTVL |
| 1034 | PM 76-B10.11 CC x | artificial | QVQLVESGGGLVKPGESLRLSCAASGFTFSDYYMYWVRQAPGKCLEWVAI |
| | I2C0-scFc | | ISDGGYYTYYSDIIKGRFTISRDNAKNSLYLQMNSLKAEDTAVYYCARGF |
| | bispecific | | PLLRHGAMDYWGQGTLVTVSSGGGGSGGGGSGGGGSDIQMTQSPSSLSAS |
| | HLE molecule | | VGDRVTITCKASQNVDTNVAWYQQKPGQAPKSLIYSASYVYWDVPSRFSG |
| | | | SASGTDFTLTISSVQSEDFATYYCQQYDQQLITFGCGTKLEIKSGGGGSE |
| | | | VQLVESGGGLVQPGGSLKLSCAASGFTFNKYAMNWVRQAPGKGLEWVARI |
| | | | RSKYNNYATYYADSVKDRFTISRDDSKNTAYLQMNNLKTEDTAVYYCVRH |
| | | | GNFGNSYISYWAYWGQGTLVTVSSGGGGSGGGGSGGGGSQTVVTQEPSLT |
| | | | VSPGGTVTLTCGSSTGAVTSGNYPNWVQQKPGQAPRGLIGGTKFLAPGTP |
| | | | ARFSGSLLGGKAALTLSGVQPEDEAEYYCVLWYSNRWVFGGGTKLTVLGG |
| | | | GGDKTHTCPPCPAPELLGGPSVFLFPPKPKDTLMISRTPEVTCVVVDVSH |
| | | | EDPEVKFNWYVDGVEVHNAKTKPCEEQYGSTYRCVSVLTVLHQDWLNGKE |
| | | | YKCKVSNKALPAPIEKTISKAKGQPREPQVYTLPPSREEMTKNQVSLTCL |
| | | | VKGFYPSDIAVEWESNGQPENNYKTTPPVLDSDGSFFLYSKLTVDKSRWQ |
| | | | QGNVFSCSVMHEALHNHYTQKSLSLSPGKGGGGSGGGGSGGGGSGGGGSG |
| | | | GGGSGGGGSDKTHTCPPCPAPELLGGPSVFLFPPKPKDTLMISRTPEVTC |
| | | | VVVDVSHEDPEVKFNWYVDGVEVHNAKTKPCEEQYGSTYRCVSVLTVLHQ |
| | | | DWLNGKEYKCKVSNKALPAPIEKTISKAKGQPREPQVYTLPPSREEMTKN |
| | | | QVSLTCLVKGFYPSDIAVEWESNGQPENNYKTTPPVLDSDGSFFLYSKLT |
| | | | VDKSRWQQGNVFSCSVMHEALHNHYTQKSLSLSPGK |
| 1035 | PM 76-B10.11 CC x | artificial | QVQLVESGGGLVKPGESLRLSCAASGFTFSDYYMYWVRQAPGKCLEWVAI |
| | I2C0-scFc_delGK | | ISDGGYYTYYSDIIKGRFTISRDNAKNSLYLQMNSLKAEDTAVYYCARGE |
| | bispecific | | PLLRHGAMDYWGQGTLVTVSSGGGGSGGGGSGGGGSDIQMTQSPSSLSAS |
| | HLE molecule | | VGDRVTITCKASQNVDTNVAWYQQKPGQAPKSLIYSASYVYWDVPSRFSG |
| | | | SASGTDFTLTISSVQSEDFATYYCQQYDQQLITFGCGTKLEIKSGGGGSE |
| | | | VQLVESGGGLVQPGGSLKLSCAASGFTFNKYAMNWVRQAPGKGLEWVARI |
| | | | RSKYNNYATYYADSVKDRFTISRDDSKNTAYLQMNNLKTEDTAVYYCVRH |
| | | | GNFGNSYISYWAYWGQGTLVTVSSGGGGSGGGGSGGGGSQTVVTQEPSLT |
| | | | VSPGGTVTLTCGSSTGAVTSGNYPNWVQQKPGQAPRGLIGGTKFLAPGTP |
| | | | ARFSGSLLGGKAALTLSGVQPEDEAEYYCVLWYSNRWVFGGGTKLTVLGG |
| | | | GGDKTHTCPPCPAPELLGGPSVFLFPPKPKDTLMISRTPEVTCVVVDVSH |
| | | | EDPEVKFNWYVDGVEVHNAKTKPCEEQYGSTYRCVSVLTVLHQDWLNGKE |
| | | | YKCKVSNKALPAPIEKTISKAKGQPREPQVYTLPPSREEMTKNQVSLTCL |
| | | | VKGFYPSDIAVEWESNGQPENNYKTTPPVLDSDGSFFLYSKLTVDKSRWQ |
| | | | QGNVFSCSVMHEALHNHYTQKSLSLSPGGGGSGGGGSGGGGSGGGGSGGG |
| | | | GSGGGGSDKTHTCPPCPAPELLGGPSVFLFPPKPKDTLMISRTPEVTCVV |
| | | | VDVSHEDPEVKFNWYVDGVEVHNAKTKPCEEQYGSTYRCVSVLTVLHQDW |
| | | | LNGKEYKCKVSNKALPAPIEKTISKAKGQPREPQVYTLPPSREEMTKNQV |
| | | | SLTCLVKGFYPSDIAVEWESNGQPENNYKTTPPVLDSDGSFFLYSKLTVD |
| | | | KSRWQQGNVFSCSVMHEALHNHYTQKSLSLSPGK |
| 1036 | PM 76-B10.11 CC x | artificial | QVQLVESGGGLVKPGESLRLSCAASGFTFSDYYMYWVRQAPGKCLEWVAI |
| | I2C0 CC (103/43)- | | ISDGGYYTYYSDIIKGRFTISRDNAKNSLYLQMNSLKAEDTAVYYCARGF |
| | scFc bispecific | | PLLRHGAMDYWGQGTLVTVSSGGGGSGGGGSGGGGSDIQMTQSPSSLSAS |
| | molecule | | VGDRVTITCKASQNVDTNVAWYQQKPGQAPKSLIYSASYVYWDVPSRFSG |
| | | | SASGTDFTLTISSVQSEDFATYYCQQYDQQLITFGCGTKLEIKSGGGGSE |
| | | | VQLVESGGGLVQPGGSLKLSCAASGFTFNKYAMNWVRQAPGKGLEWVARI |
| | | | RSKYNNYATYYADSVKDRFTISRDDSKNTAYLQMNNLKTEDTAVYYCVRH |
| | | | GNFGNSYISYWAYCGQGTLVTVSSGGGGSGGGGSGGGGSQTVVTQEPSLT |
| | | | VSPGGTVTLTCGSSTGAVTSGNYPNWVQQKPGQCPRGLIGGTKFLAPGTP |
| | | | ARFSGSLLGGKAALTLSGVQPEDEAEYYCVLWYSNRWVFGGGTKLTVL |
| 1037 | PM 76-B10.11 CC x | artificial | QVQLVESGGGLVKPGESLRLSCAASGFTFSDYYMYWVRQAPGKCLEWVAI |
| | I2C0 CC (103/43)- | | ISDGGYYTYYSDIIKGRFTISRDNAKNSLYLQMNSLKAEDTAVYYCARGF |
| | SCFC bispecific | | PLLRHGAMDYWGQGTLVTVSSGGGGSGGGGSGGGGSDIQMTQSPSSLSAS |
| | HLE molecule | | VGDRVTITCKASQNVDTNVAWYQQKPGQAPKSLIYSASYVYWDVPSRFSG |
| | | | SASGTDFTLTISSVQSEDFATYYCQQYDQQLITFGCGTKLEIKSGGGGSE |
| | | | VQLVESGGGLVQPGGSLKLSCAASGFTFNKYAMNWVRQAPGKGLEWVARI |
| | | | RSKYNNYATYYADSVKDRFTISRDDSKNTAYLQMNNLKTEDTAVYYCVRH |
| | | | GNFGNSYISYWAYCGQGTLVTVSSGGGGSGGGGSGGGGSQTVVTQEPSLT |
| | | | VSPGGTVTLTCGSSTGAVTSGNYPNWVQQKPGQCPRGLIGGTKFLAPGTP |
| | | | ARFSGSLLGGKAALTLSGVQPEDEAEYYCVLWYSNRWVFGGGTKLTVLGG |
| | | | GGDKTHTCPPCPAPELLGGPSVFLFPPKPKDTLMISRTPEVTCVVVDVSH |
| | | | EDPEVKFNWYVDGVEVHNAKTKPCEEQYGSTYRCVSVLTVLHQDWLNGKE |
| | | | YKCKVSNKALPAPIEKTISKAKGQPREPQVYTLPPSREEMTKNQVSLTCL |
| | | | VKGFYPSDIAVEWESNGQPENNYKTTPPVLDSDGSFFLYSKLTVDKSRWQ |
| | | | QGNVFSCSVMHEALHNHYTQKSLSLSPGKGGGGSGGGGSGGGGSGGGGSG |
| | | | GGGSGGGGSDKTHTCPPCPAPELLGGPSVFLFPPKPKDTLMISRTPEVTC |
| | | | VVVDVSHEDPEVKFNWYVDGVEVHNAKTKPCEEQYGSTYRCVSVLTVLHQ |
| | | | DWLNGKEYKCKVSNKALPAPIEKTISKAKGQPREPQVYTLPPSREEMTKN |
| | | | QVSLTCLVKGFYPSDIAVEWESNGQPENNYKTTPPVLDSDGSFFLYSKLT |
| | | | VDKSRWQQGNVFSCSVMHEALHNHYTQKSLSLSPGK |
| 1038 | PM 76-B10.11 CC x | artificial | QVQLVESGGGLVKPGESLRLSCAASGFTFSDYYMYWVRQAPGKCLEWVAI |
| | I2C0 CC (103/43)- | | ISDGGYYTYYSDIIKGRFTISRDNAKNSLYLQMNSLKAEDTAVYYCARGF |
| | ScFc_delGK | | PLLRHGAMDYWGQGTLVTVSSGGGGSGGGGSGGGGSDIQMTQSPSSLSAS |
| | bispecific | | VGDRVTITCKASQNVDTNVAWYQQKPGQAPKSLIYSASYVYWDVPSRFSG |
| | HLE molecule | | SASGTDFTLTISSVQSEDFATYYCQQYDQQLITFGCGTKLEIKSGGGGSE |
| | | | VQLVESGGGLVQPGGSLKLSCAASGFTFNKYAMNWVRQAPGKGLEWVARI |
| | | | RSKYNNYATYYADSVKDRFTISRDDSKNTAYLQMNNLKTEDTAVYYCVRH |
| | | | GNFGNSYISYWAYCGQGTLVTVSSGGGGSGGGGSGGGGSQTVVTQEPSLT |
| | | | VSPGGTVTLTCGSSTGAVTSGNYPNWVQQKPGQCPRGLIGGTKFLAPGTP |
| | | | ARFSGSLLGGKAALTLSGVQPEDEAEYYCVLWYSNRWVFGGGTKLTVLGG |
| | | | GGDKTHTCPPCPAPELLGGPSVFLFPPKPKDTLMISRTPEVTCVVVDVSH |
| | | | EDPEVKFNWYVDGVEVHNAKTKPCEEQYGSTYRCVSVLTVLHQDWLNGKE |
| | | | YKCKVSNKALPAPIEKTISKAKGQPREPQVYTLPPSREEMTKNQVSLTCL |
| | | | VKGFYPSDIAVEWESNGQPENNYKTTPPVLDSDGSFFLYSKLTVDKSRWQ |
| | | | QGNVFSCSVMHEALHNHYTQKSLSLSPGGGGSGGGGSGGGGSGGGGSGGG |
| | | | GSGGGGSDKTHTCPPCPAPELLGGPSVFLFPPKPKDTLMISRTPEVTCVV |
| | | | VDVSHEDPEVKFNWYVDGVEVHNAKTKPCEEQYGSTYRCVSVLTVLHQDW |
| | | | LNGKEYKCKVSNKALPAPIEKTISKAKGQPREPQVYTLPPSREEMTKNQV |
| | | | SLTCLVKGFYPSDIAVEWESNGQPENNYKTTPPVLDSDGSFFLYSKLTVD |
| | | | KSRWQQGNVFSCSVMHEALHNHYTQKSLSLSPGK |
| 1039 | DLL3 | human | MVSPRMSGLLSQTVILALIFLPQTRPAGVFELQIHSFGPGPGPGAPRSPC |
| | | | SARLPCRLFFRVCLKPGLSEEAAESPCALGAALSARGPVYTEQPGAPAPD |
| | | | LPLPDGLLQVPFRDAWPGTFSFIIETWREELGDQIGGPAWSLLARVAGRR |
| | | | RLAAGGPWARDIQRAGAWELRFSYRARCEPPAVGTACTRLCRPRSAPSRC |
| | | | GPGLRPCAPLEDECEAPLVCRAGCSPEHGFCEQPGECRCLEGWTGPLCTV |
| | | | PVSTSSCLSPRGPSSATTGCLVPGPGPCDGNPCANGGSCSETPRSFECTC |
| | | | PRGFYGLRCEVSGVTCADGPCFNGGLCVGGADPDSAYICHCPPGFQGSNC |
| | | | EKRVDRCSLQPCRNGGLCLDLGHALRCRCRAGFAGPRCEHDLDDCAGRAC |
| | | | ANGGTCVEGGGAHRCSCALGFGGRDCRERADPCAARPCAHGGRCYAHFSG |
| | | | LVCACAPGYMGARCEFPVHPDGASALPAAPPGLRPGDPQRYLLPPALGLL |
| | | | VAAGVAGAALLLVHVRRRGHSQDAGSRLLAGTPEPSVHALPDALNNLRTQ |
| | | | EGSGDGPSSSVDWNRPEDVDPQGIYVISAPSIYAREVATPLFPPLHTGRA |
| | | | GQRQHLLFPYPSSILSVK |
| 1040 | DLL3 CDR-H1 | artificial | SYYWS |
| 1041 | DLL3 CDR-H2 | artificial | YVYYSGTTNYNPSLKS |
| 1042 | DLL3 CDR-H3 | artificial | IAVTGFYFDY |
| 1043 | DLL3 CDR-L1 | artificial | RASQRVNNNYLA |
| 1044 | DLL3 CDR-L2 | artificial | GASSRAT |
| 1045 | DLL3 CDR-L3 | artificial | QQYDRSPLT |
| 1046 | DLL3 CDR-H1 | artificial | SYYWS |
| 1047 | DLLS CDR-H2 | artificial | YIYYSGRTNYYPSLKS |
| 1048 | DLL3 CDR-H3 | artificial | IAVAGFFFDY |
| 1049 | DLL3 CDR-L1 | artificial | RASQSVNKNYLA |
| 1050 | DLL3 CDR-L2 | artificial | GASSRAT |
| 1051 | DLL3 CDR-L3 | artificial | QQYDRSPLT |
| 1052 | DLL3 CDR-H1 | artificial | SFYWS |
| 1053 | DLL3 CDR-H2 | artificial | YIYYSGTTNYNPSLKS |
| 1054 | DLL3 CDR-H3 | artificial | IAVAGFFFDY |
| 1055 | DLL3 CDR-L1 | artificial | RASQSVNKNYLA |
| 1056 | DLL3 CDR-L2 | artificial | GASSRAT |
| 1057 | DLL3 CDR-L3 | artificial | QQYDRSPLT |
| 1058 | DLL3 CDR-H1 | artificial | SFYWS |
| 1059 | DLL3 CDR-H2 | artificial | YIYYSGTTNYNPSLKS |
| 1060 | DLL3 CDR-H3 | artificial | IAVAGFFFDY |
| 1061 | DLL3 CDR-L1 | artificial | RASQSVNKNYLA |
| 1062 | DLL3 CDR-L2 | artificial | GASSRAT |
| 1063 | DLL3 CDR-L3 | artificial | QQYDRSPLT |
| 1064 | DLL3 CDR-H1 | artificial | SFYWS |
| 1065 | DLL3 CDR-H2 | artificial | YIYYSGTTNYNPSLKS |
| 1066 | DLL3 CDR-H3 | artificial | IAVAGFFFDY |
| 1067 | DLL3 CDR-L1 | artificial | RASQSVNKNYLA |
| 1068 | DLL3 CDR-L2 | artificial | GASSRAT |
| 1069 | DLL3 CDR-L3 | artificial | QQYDRSPLT |
| 1070 | DLL3 CDR-H1 | artificial | SFYWS |
| 1071 | DLL3 CDR-H2 | artificial | YIYYSGTTNYNPSLKS |
| 1072 | DLL3 CDR-H3 | artificial | IAVAGFFFDY |
| 1073 | DLL3 CDR-L1 | artificial | RASQSVNKNYLA |
| 1074 | DLL3 CDR-L2 | artificial | GASSRAT |
| 1075 | DLL3 CDR-L3 | artificial | QQYDRSPLT |
| 1076 | DLL3 CDR-H1 | artificial | SYYWS |
| 1077 | DLL3 CDR-H2 | artificial | YIFYNGITNYNPSLKS |
| 1078 | DLL3 CDR-H3 | artificial | IHSGSFSFDY |
| 1079 | DLL3 CDR-L1 | artificial | RASQSVSRGYLA |
| 1080 | DLL3 CDR-L2 | artificial | GASSRAT |
| 1081 | DLL3 CDR-L3 | artificial | QQYDTSPIT |
| 1082 | DLL3 CDR-H1 | artificial | NAGMS |
| 1083 | DLL3 CDR-H2 | artificial | RIKNKIDGGTTDFAAPVKG |
| 1084 | DLL3 CDR-H3 | artificial | RGWYGDYFDY |
| 1085 | DLL3 CDR-L1 | artificial | RSSQSLLHSNGYNYLD |
| 1086 | DLL3 CDR-L2 | artificial | LGSNRAS |
| 1087 | DLL3 CDR-L3 | artificial | MQALQTPFT |
| 1088 | DLL3 CDR-H1 | artificial | SYDIH |
| 1089 | DLL3 CDR-H2 | artificial | VISSHGSNKNYARSVKG |
| 1090 | DLL3 CDR-H3 | artificial | DGYSGNDPFYYYYHGMDV |
| 1091 | DLL3 CDR-L1 | artificial | RASQSISSYLN |
| 1092 | DLL3 CDR-L2 | artificial | AASSLQS |
| 1093 | DLL3 CDR-L3 | artificial | QQSFTTPLT |
| 1094 | DLL VH region | artificial | QVQLQESGPGLVKPSETLSLTCTVSGGSISSYYWSWIRQPPGKGLEWIGY |
| | | | VYYSGTTNYNPSLKSRVTISVDTSKNQFSLKLSSVTAADTAVYYCASIAV |
| | | | TGFYFDYWGQGTLVTVSS |
| 1095 | DLL VH region | artificial | QVQLQESGPGLVKPSETLSLTCTVSGGSISSYYWSWIRQPPGKGLEWIGY |
| | | | IYYSGRTNYYPSLKSRVTISIDTSKNQFSLKLSSVTAADTAVYYCARIAV |
| | | | AGFFFDYWGQGTLVTVSS |
| 1096 | DLL VH region | artificial | QVQLQESGPGLVKPSETLSLTCTVSGASISSFYWSWIRQPPGKGLEWIGY |
| | | | IYYSGTTNYNPSLKSRVTISVDTSKNQFSLKLSSVTAADTAVYYCARIAV |
| | | | AGFFFDYWGQGTLVTVSS |
| 1097 | DLL VH region | artificial | QVQLQESGPGLVKPSQTLSLTCTVSGASISSFYWSWIRQPPGKGLEWIGY |
| | | | IYYSGTTNYNPSLKSRVTISVDTSKNQFSLKLSSVTAADTAVYYCARIAV |
| | | | AGFFFDYWGQGTLVTVSS |
| 1098 | DLL VH region | artificial | QVQLQEWGPGLVKPSETLSLTCTVSGASISSFYWSWIRQPPGKGLEWIGY |
| | | | IYYSGTTNYNPSLKSRVTISVDTSKNQLSLKLSSVTAADTAVYYCARIAV |
| | | | AGFFFDYWGQGTLVTVSSK |
| 1099 | DLL VH region | artificial | QVQLQESGPGLVKPSETLSLTCTVSGASISSFYWSWIRQPPGKGLEWIGY |
| | | | IYYSGTTNYNPSLKSRVTISVDTSKNQFSLKLSSVTAADTAVYYCARIAV |
| | | | AGFFFDYWGQGTLVTVSS |
| 1100 | DLL VH region | artificial | QVQLQESGPGLVKPSQTLSLTCTVSGGSISSYYWSWIRQPPGKGLEWIGY |
| | | | IFYNGITNYNPSLKSRVTISLDTSKNQFSLKLSSVTAADTAKYYCARIHS |
| | | | GSFSFDYWDQGTLVTVSS |
| 1101 | DLL VH region | artificial | EVQLVESGGGLVKPGGSLRLSCAASGFIFNNAGMSWVRQAPGKGLEWVGR |
| | | | IKNKIDGGTTDFAAPVKGRFTISRDDSKNTLYLQMNSLKAEDTAVYYCTA |
| | | | RGWYGDYFDYWGQGTLVTVSS |
| 1102 | DLL VH region | artificial | QVQLVESGGGVVQPGRSLRLSCAASGFSFSSYDIHWVRQAPGKGLEWVAV |
| | | | ISSHGSNKNYARSVKGRFTISRDNSKNTLYLQMNSLKAEDTAVYYCARDG |
| | | | YSGNDPFYYYYHGMDVWGQGTTVTVSS |
| 1103 | DLL VH region | artificial | QVQLQESGPGLVKPSETLSLTCTVSGGSISSYYWSWIRQPPGKCLEWIGY |
| | | | VYYSGTTNYNPSLKSRVTISVDTSKNQFSLKLSSVTAADTAVYYCASIAV |
| | | | TGFYFDYWGQGTLVTVSS529 |
| 1104 | DLL VH region | artificial | QVQLQESGPGLVKPSETLSLTCTVSGASISSFYWSWIRQPPGKCLEWIGY |
| | | | IYYSGTTNYNPSLKSRVTISVDTSKNQFSLKLSSVTAADTAVYYCARIAV |
| | | | AGFFFDYWGQGTLVTVSS |
| 1105 | DLL VL REGION | artificial | EIVLTQSPGTLSLSPGERVTLSCRASQRVNNNYLAWYQQRPGQAPRLLIY |
| | | | GASSRATGIPDRFSGSGSGTDFTLTISRLEPEDFAVYYCQQYDRSPLTFG |
| | | | GGTKLEIK |
| 1106 | DLL VL REGION | artificial | EIVLTQSPGTLSLSPGERATLSCRASQSVNKNYLAWYQQKPGQAPRLLIY |
| | | | GASSRATGIPDRFSGSGSGTDFTLTISRLEPEDFAVYYCQQYDRSPLTFG |
| | | | GGTKLEIK |
| 1107 | DLL VL REGION | artificial | EIVLTQSPGTLSLSPGERATLSCRASQSVNKNYLAWYQQKPGQAPRLLIY |
| | | | GASSRATGIPDRFSGSGSGTDFTLTISRLEPEDFAVYYCQQYDRSPLTFG |
| | | | GGTKVEIK |
| 1108 | DLL VL REGION | artificial | EIVLTQSPGTLSLSPGERATLSCRASQSVNKNYLAWYQQKPGQAPRLLIY |
| | | | GASSRATGIPDRFSGSGSGTDFTLTISRLEPEDFAVYYCQQYDRSPLTFG |
| | | | GGTKVEIK |
| 1109 | DLL VL REGION | artificial | EIVLTQSPGTLSLSPGERATLSCRASQSVNKNYLAWYQQKPGQAPRLLIY |
| | | | GASSRATGIPDRFSGSGSGTDFTLTISRLEPEDFAVYYCQQYDRSPLTFG |
| | | | GGTKVDIK88 |
| 1110 | DLL VL REGION | artificial | EIVLTQSPGTLSLSPGESATLSCRASQSVNKNYLAWYQQKPGQAPRLLIY |
| | | | GASSRATGIPDRFSGSGSGTDFTLTISRLEPEDFAVYYCQQYDRSPLTFG |
| | | | GGTRLEIK |
| 1111 | DLL VL REGION | artificial | EIVMTQSPGTLSLSPGERATLSCRASQSVSRGYLAWYQQKPGQAPRLLIY |
| | | | GASSRATDIPDRFSGSGSGTDFTLTISRLEPEDFAVYYCQQYDTSPITFG |
| | | | QGTKVEIK |
| 1112 | DLL VL REGION | artificial | DIVMTQTPLSLPVTPGEPASISCRSSQSLLHSNGYNYLDWYLQKPGQSPQ |
| | | | LLIYLGSNRASGVPDRFSGSGSGTDFTLKISRVEAEDVGIYYCMQALQTP |
| | | | FTFGPGTKVEIK |
| 1113 | DLL VL REGION | artificial | DIQMTQSPSSLSASVGDRVTITCRASQSISSYLNWYQQKPGKAPKLLIYA |
| | | | ASSLQSGVPSRFSGSGSGTDFSLTISSLQPEDFATYYCQQSFTTPLTFGG |
| | | | GTKVEIK |
| 1114 | DLL VL REGION | artificial | EIVLTQSPGTLSLSPGERVTLSCRASQRVNNNYLAWYQQRPGQAPRLLIY |
| | | | GASSRATGIPDRFSGSGSGTDFTLTISRLEPEDFAVYYCQQYDRSPLTFG |
| | | | CGTKLEIK |
| 1115 | DLL VL REGION | artificial | EIVLTQSPGTLSLSPGERATLSCRASQSVNKNYLAWYQQKPGQAPRLLIY |
| | | | GASSRATGIPDRFSGSGSGTDFTLTISRLEPEDFAVYYCQQYDRSPLTFG |
| | | | CGTKVEIK |
| 1116 | DLL BINDING DOMAIN | artificial | QVQLQESGPGLVKPSETLSLTCTVSGGSISSYYWSWIRQPPGKGLEWIGY |
| | | | VYYSGTTNYNPSLKSRVTISVDTSKNQFSLKLSSVTAADTAVYYCASIAV |
| | | | TGFYFDYWGQGTLVTVSSGGGGSGGGGSGGGGSEIVLTQSPGTLSLSPGE |
| | | | RVTLSCRASQRVNNNYLAWYQQRPGQAPRLLIYGASSRATGIPDRFSGSG |
| | | | SGTDFTLTISRLEPEDFAVYYCQQYDRSPLTFGGGTKLEIK |
| 1117 | DLL BINDING DOMAIN | artificial | QVQLQESGPGLVKPSETLSLTCTVSGGSISSYYWSWIRQPPGKGLEWIGY |
| | | | IYYSGRTNYYPSLKSRVTISIDTSKNQFSLKLSSVTAADTAVYYCARIAV |
| | | | AGFFFDYWGQGTLVTVSSGGGGSGGGGSGGGGSEIVLTQSPGTLSLSPGE |
| | | | RATLSCRASQSVNKNYLAWYQQKPGQAPRLLIYGASSRATGIPDRFSGSG |
| | | | SGTDFTLTISRLEPEDFAVYYCQQYDRSPLTFGGGTKLEIK59 |
| 1118 | DLL BINDING DOMAIN | artificial | QVQLQESGPGLVKPSETLSLTCTVSGASISSFYWSWIRQPPGKGLEWIGY |
| | | | IYYSGTTNYNPSLKSRVTISVDTSKNQFSLKLSSVTAADTAVYYCARIAV |
| | | | AGFFFDYWGQGTLVTVSSGGGGSGGGGSGGGGSEIVLTQSPGTLSLSPGE |
| | | | RATLSCRASQSVNKNYLAWYQQKPGQAPRLLIYGASSRATGIPDRFSGSG |
| | | | SGTDFTLTISRLEPEDFAVYYCQQYDRSPLTFGGGTKVEIK |
| 1119 | DLL BINDING DOMAIN | artificial | QVQLQESGPGLVKPSQTLSLTCTVSGASISSFYWSWIRQPPGKGLEWIGY |
| | | | IYYSGTTNYNPSLKSRVTISVDTSKNQFSLKLSSVTAADTAVYYCARIAV |
| | | | AGFFFDYWGQGTLVTVSSGGGGSGGGGSGGGGSEIVLTQSPGTLSLSPGE |
| | | | RATLSCRASQSVNKNYLAWYOQKPGQAPRLLIYGASSRATGIPDRFSGSG |
| | | | SGTDFTLTISRLEPEDFAVYYCQQYDRSPLTFGGGTKVEIK |
| 1120 | DLL BINDING DOMAIN | artificial | QVQLQEWGPGLVKPSETLSLTCTVSGASISSFYWSWIRQPPGKGLEWIGY |
| | | | IYYSGTTNYNPSLKSRVTISVDTSKNQLSLKLSSVTAADTAVYYCARIAV |
| | | | AGFFFDYWGQGTLVTVSSGGGGSGGGGSGGGGSEIVLTQSPGTLSLSPGE |
| | | | RATLSCRASQSVNKNYLAWYQQKPGQAPRLLIYGASSRATGIPDRFSGSG |
| | | | SGTDFTLTISRLEPEDFAVYYCQQYDRSPLTFGGGTKVDIK |
| 1121 | DLL BINDING DOMAIN | artificial | QVQLQESGPGLVKPSETLSLTCTVSGASISSFYWSWIRQPPGKGLEWIGY |
| | | | IYYSGTTNYNPSLKSRVTISVDTSKNQFSLKLSSVTAADTAVYYCARIAV |
| | | | AGFFFDYWGQGTLVTVSSGGGGSGGGGSGGGGSEIVLTQSPGTLSLSPGE |
| | | | SATLSCRASQSVNKNYLAWYQQKPGQAPRLLIYGASSRATGIPDRFSGSG |
| | | | SGTDFTLTISRLEPEDFAVYYCQQYDRSPLTFGGGTRLEIK |
| 1122 | DLL BINDING DOMAIN | artificial | QVQLQESGPGLVKPSQTLSLTCTVSGGSISSYYWSWIRQPPGKGLEWIGY |
| | | | IFYNGITNYNPSLKSRVTISLDTSKNQFSLKLSSVTAADTAKYYCARIHS |
| | | | GSFSFDYWDQGTLVTVSSGGGGSGGGGSGGGGSEIVMTQSPGTLSLSPGE |
| | | | RATLSCRASQSVSRGYLAWYQQKPGQAPRLLIYGASSRATDIPDRFSGSG |
| | | | SGTDFTLTISRLEPEDFAVYYCQQYDTSPITFGQGTKVEIK |
| 1123 | DLL BINDING DOMAIN | artificial | EVQLVESGGGLVKPGGSLRLSCAASGFIFNNAGMSWVRQAPGKGLEWVGR |
| | | | IKNKIDGGTTDFAAPVKGRFTISRDDSKNTLYLQMNSLKAEDTAVYYCTA |
| | | | RGWYGDYFDYWGQGTLVTVSSGGGGSGGGGSGGGGSDIVMTQTPLSLPVT |
| | | | PGEPASISCRSSQSLLHSNGYNYLDWYLQKPGQSPQLLIYLGSNRASGVP |
| | | | DRFSGSGSGTDFTLKISRVEAEDVGIYYCMQALQTPFTFGPGTKVEIK |
| 1124 | DLL BINDING DOMAIN | artificial | QVQLVESGGGVVQPGRSLRLSCAASGFSFSSYDIHWVRQAPGKGLEWVAV |
| | | | ISSHGSNKNYARSVKGRFTISRDNSKNTLYLQMNSLKAEDTAVYYCARDG |
| | | | YSGNDPFYYYYHGMDVWGQGTTVTVSSGGGGSGGGGSGGGGSDIQMTQSP |
| | | | SSLSASVGDRVTITCRASQSISSYLNWYQQKPGKAPKLLIYAASSLQSGV |
| | | | PSRFSGSGSGTDFSLTISSLQPEDFATYYCQQSFTTPLTFGGGTKVEIK |
| 1125 | DLL BINDING DOMAIN | artificial | QVQLQESGPGLVKPSETLSLTCTVSGGSISSYYWSWIRQPPGKCLEWIGY |
| | | | VYYSGTTNYNPSLKSRVTISVDTSKNQFSLKLSSVTAADTAVYYCASIAV |
| | | | TGFYFDYWGQGTLVTVSSGGGGSGGGGSGGGGSEIVLTQSPGTLSLSPGE |
| | | | RVTLSCRASQRVNNNYLAWYQQRPGQAPRLLIYGASSRATGIPDRFSGSG |
| | | | SGTDFTLTISRLEPEDFAVYYCQQYDRSPLTFGCGTKLEIK |
| 1126 | DLL BINDING DOMAIN | artificial | QVQLQESGPGLVKPSETLSLTCTVSGASISSFYWSWIRQPPGKCLEWIGY |
| | | | IYYSGTTNYNPSLKSRVTISVDTSKNQFSLKLSSVTAADTAVYYCARIAV |
| | | | AGFFFDYWGQGTLVTVSSGGGGSGGGGSGGGGSEIVLTQSPGTLSLSPGE |
| | | | RATLSCRASQSVNKNYLAWYQQKPGQAPRLLIYGASSRATGIPDRFSGSG |
| | | | SGTDFTLTISRLEPEDFAVYYCQQYDRSPLTFGCGTKVEIK |
| 1127 | DLL BINDING DOMAIN | artificial | QVQLQESGPGLVKPSETLSLTCTVSGGSISSYYWSWIRQPPGKGLEWIGY |
| | | | VYYSGTTNYNPSLKSRVTISVDTSKNQFSLKLSSVTAADTAVYYCASIAV |
| | | | TGFYFDYWGQGTLVTVSSGGGGSGGGGSGGGGSEIVLTQSPGTLSLSPGE |
| | | | RVTLSCRASQRVNNNYLAWYQQRPGQAPRLLIYGASSRATGIPDRFSGSG |
| | | | SGTDFTLTISRLEPEDFAVYYCQQYDRSPLTFGGGTKLEIKSGGGGSEVQ |
| | | | LVESGGGLVQPGGSLKLSCAASGFTFNKYAMNWVRQAPGKGLEWVARIRS |
| | | | KYNNYATYYADSVKDRFTISRDDSKNTAYLQMNNLKTEDTAVYYCVRHGN |
| | | | FGNSYISYWAYWGQGTLVTVSSGGGGSGGGGSGGGGSQTVVTQEPSLTVS |
| | | | PGGTVTLTCGSSTGAVTSGNYPNWVQQKPGQAPRGLIGGTKFLAPGTPAR |
| | | | FSGSLLGGKAALTLSGVQPEDEAEYYCVLWYSNRWVFGGGTKLTVL |
| 1128 | DLL BINDING DOMAIN | artificial | QVQLQESGPGLVKPSETLSLTCTVSGGSISSYYWSWIRQPPGKGLEWIGY |
| | | | IYYSGRTNYYPSLKSRVTISIDTSKNQFSLKLSSVTAADTAVYYCARIAV |
| | | | AGFFFDYWGQGTLVTVSSGGGGSGGGGSGGGGSEIVLTQSPGTLSLSPGE |
| | | | RATLSCRASQSVNKNYLAWYQQKPGQAPRLLIYGASSRATGIPDRFSGSG |
| | | | SGTDFTLTISRLEPEDFAVYYCQQYDRSPLTFGGGTKLEIKSGGGGSEVQ |
| | | | LVESGGGLVQPGGSLKLSCAASGFTFNKYAMNWVRQAPGKGLEWVARIRS |
| | | | KYNNYATYYADSVKDRFTISRDDSKNTAYLQMNNLKTEDTAVYYCVRHGN |
| | | | FGNSYISYWAYWGQGTLVTVSSGGGGSGGGGSGGGGSQTVVTQEPSLTVS |
| | | | PGGTVTLTCGSSTGAVTSGNYPNWVQQKPGQAPRGLIGGTKFLAPGTPAR |
| | | | FSGSLLGGKAALTLSGVQPEDEAEYYCVLWYSNRWVFGGGTKLTVL |
| 1129 | DLL BINDING DOMAIN | artificial | QVQLQESGPGLVKPSETLSLTCTVSGASISSFYWSWIRQPPGKGLEWIGY |
| | | | IYYSGTTNYNPSLKSRVTISVDTSKNQFSLKLSSVTAADTAVYYCARIAV |
| | | | AGFFFDYWGQGTLVTVSSGGGGSGGGGSGGGGSEIVLTQSPGTLSLSPGE |
| | | | RATLSCRASQSVNKNYLAWYQQKPGQAPRLLIYGASSRATGIPDRFSGSG |
| | | | SGTDFTLTISRLEPEDFAVYYCQQYDRSPLTFGGGTKVEIKSGGGGSEVQ |
| | | | LVESGGGLVQPGGSLKLSCAASGFTFNKYAMNWVRQAPGKGLEWVARIRS |
| | | | KYNNYATYYADSVKDRFTISRDDSKNTAYLQMNNLKTEDTAVYYCVRHGN |
| | | | FGNSYISYWAYWGQGTLVTVSSGGGGSGGGGSGGGGSQTVVTQEPSLTVS |
| | | | PGGTVTLTCGSSTGAVTSGNYPNWVQQKPGQAPRGLIGGTKFLAPGTPAR |
| | | | FSGSLLGGKAALTLSGVQPEDEAEYYCVLWYSNRWVFGGGTKLTVL |
| 1130 | DLL BINDING DOMAIN | artificial | QVQLQESGPGLVKPSQTLSLTCTVSGASISSFYWSWIRQPPGKGLEWIGY |
| | | | IYYSGTTNYNPSLKSRVTISVDTSKNQFSLKLSSVTAADTAVYYCARIAV |
| | | | AGFFFDYWGQGTLVTVSSGGGGSGGGGSGGGGSEIVLTQSPGTLSLSPGE |
| | | | RATLSCRASQSVNKNYLAWYQQKPGQAPRLLIYGASSRATGIPDRFSGSG |
| | | | SGTDFTLTISRLEPEDFAVYYCQQYDRSPLTFGGGTKVEIKSGGGGSEVQ |
| | | | LVESGGGLVQPGGSLKLSCAASGFTFNKYAMNWVRQAPGKGLEWVARIRS |
| | | | KYNNYATYYADSVKDRFTISRDDSKNTAYLQMNNLKTEDTAVYYCVRHGN |
| | | | FGNSYISYWAYWGQGTLVTVSSGGGGSGGGGSGGGGSQTVVTQEPSLTVS |
| | | | PGGTVTLTCGSSTGAVTSGNYPNWVQQKPGQAPRGLIGGTKFLAPGTPAR |
| | | | FSGSLLGGKAALTLSGVQPEDEAEYYCVLWYSNRWVFGGGTKLTVL |
| 1131 | DLL BINDING DOMAIN | artificial | QVQLQEWGPGLVKPSETLSLTCTVSGASISSFYWSWIRQPPGKGLEWIGY |
| | | | IYYSGTTNYNPSLKSRVTISVDTSKNQLSLKLSSVTAADTAVYYCARIAV |
| | | | AGFFFDYWGQGTLVTVSSGGGGSGGGGSGGGGSEIVLTQSPGTLSLSPGE |
| | | | RATLSCRASQSVNKNYLAWYQQKPGQAPRLLIYGASSRATGIPDRFSGSG |
| | | | SGTDFTLTISRLEPEDFAVYYCQQYDRSPLTFGGGTKVDIKSGGGGSEVQ |
| | | | LVESGGGLVQPGGSLKLSCAASGFTFNKYAMNWVRQAPGKGLEWVARIRS |
| | | | KYNNYATYYADSVKDRFTISRDDSKNTAYLQMNNLKTEDTAVYYCVRHGN |
| | | | FGNSYISYWAYWGQGTLVTVSSGGGGSGGGGSGGGGSQTVVTQEPSLTVS |
| | | | PGGTVTLTCGSSTGAVTSGNYPNWVQQKPGQAPRGLIGGTKFLAPGTPAR |
| | | | FSGSLLGGKAALTLSGVQPEDEAEYYCVLWYSNRWVFGGGTKLTVL |
| 1132 | DLL BINDING DOMAIN | artificial | QVQLQESGPGLVKPSETLSLTCTVSGASISSFYWSWIRQPPGKGLEWIGY |
| | | | IYYSGTTNYNPSLKSRVTISVDTSKNQFSLKLSSVTAADTAVYYCARIAV |
| | | | AGFFFDYWGQGTLVTVSSGGGGSGGGGSGGGGSEIVLTQSPGTLSLSPGE |
| | | | SATLSCRASQSVNKNYLAWYQQKPGQAPRLLIYGASSRATGIPDRFSGSG |
| | | | SGTDFTLTISRLEPEDFAVYYCQQYDRSPLTFGGGTRLEIKSGGGGSEVQ |
| | | | LVESGGGLVQPGGSLKLSCAASGFTFNKYAMNWVRQAPGKGLEWVARIRS |
| | | | KYNNYATYYADSVKDRFTISRDDSKNTAYLQMNNLKTEDTAVYYCVRHGN |
| | | | FGNSYISYWAYWGQGTLVTVSSGGGGSGGGGSGGGGSQTVVTQEPSLTVS |
| | | | PGGTVTLTCGSSTGAVTSGNYPNWVQQKPGQAPRGLIGGTKFLAPGTPAR |
| | | | FSGSLLGGKAALTLSGVQPEDEAEYYCVLWYSNRWVFGGGTKLTVL |
| 1133 | DLL BINDING DOMAIN | artificial | QVQLQESGPGLVKPSQTLSLTCTVSGGSISSYYWSWIRQPPGKGLEWIGY |
| | | | IFYNGITNYNPSLKSRVTISLDTSKNQFSLKLSSVTAADTAKYYCARIHS |
| | | | GSFSFDYWDQGTLVTVSSGGGGSGGGGSGGGGSEIVMTQSPGTLSLSPGE |
| | | | RATLSCRASQSVSRGYLAWYQQKPGQAPRLLIYGASSRATDIPDRFSGSG |
| | | | SGTDFTLTISRLEPEDFAVYYCQQYDTSPITFGQGTKVEIKSGGGGSEVQ |
| | | | LVESGGGLVQPGGSLKLSCAASGFTFNKYAMNWVRQAPGKGLEWVARIRS |
| | | | KYNNYATYYADSVKDRFTISRDDSKNTAYLQMNNLKTEDTAVYYCVRHGN |
| | | | FGNSYISYWAYWGQGTLVTVSSGGGGSGGGGSGGGGSQTVVTQEPSLTVS |
| | | | PGGTVTLTCGSSTGAVTSGNYPNWVQQKPGQAPRGLIGGTKFLAPGTPAR |
| | | | FSGSLLGGKAALTLSGVQPEDEAEYYCVLWYSNRWVFGGGTKLTVL |
| 1134 | DLL BINDING DOMAIN | artificial | EVQLVESGGGLVKPGGSLRLSCAASGFIFNNAGMSWVRQAPGKGLEWVGR |
| | | | IKNKIDGGTTDFAAPVKGRFTISRDDSKNTLYLQMNSLKAEDTAVYYCTA |
| | | | RGWYGDYFDYWGQGTLVTVSSGGGGSGGGGSGGGGSDIVMTQTPLSLPVT |
| | | | PGEPASISCRSSQSLLHSNGYNYLDWYLQKPGQSPQLLIYLGSNRASGVP |
| | | | DRFSGSGSGTDFTLKISRVEAEDVGIYYCMQALQTPFTFGPGTKVEIKSG |
| | | | GGGSEVQLVESGGGLVQPGGSLKLSCAASGFTFNKYAMNWVRQAPGKGLE |
| | | | WVARIRSKYNNYATYYADSVKDRFTISRDDSKNTAYLQMNNLKTEDTAVY |
| | | | YCVRHGNFGNSYISYWAYWGQGTLVTVSSGGGGSGGGGSGGGGSQTVVTQ |
| | | | EPSLTVSPGGTVTLTCGSSTGAVTSGNYPNWVQQKPGQAPRGLIGGTKFL |
| | | | APGTPARFSGSLLGGKAALTLSGVQPEDEAEYYCVLWYSNRWVFGGGTKL |
| | | | TVL |
| 1135 | DLL BINDING DOMAIN | artificial | QVQLVESGGGVVQPGRSLRLSCAASGFSFSSYDIHWVRQAPGKGLEWVAV |
| | | | ISSHGSNKNYARSVKGRFTISRDNSKNTLYLQMNSLKAEDTAVYYCARDG |
| | | | YSGNDPFYYYYHGMDVWGQGTTVTVSSGGGGSGGGGSGGGGSDIQMTQSP |
| | | | SSLSASVGDRVTITCRASQSISSYLNWYQQKPGKAPKLLIYAASSLQSGV |
| | | | PSRFSGSGSGTDFSLTISSLQPEDFATYYCQQSFTTPLTFGGGTKVEIKS |
| | | | GGGGSEVQLVESGGGLVQPGGSLKLSCAASGFTFNKYAMNWVRQAPGKGL |
| | | | EWVARIRSKYNNYATYYADSVKDRFTISRDDSKNTAYLQMNNLKTEDTAV |
| | | | YYCVRHGNFGNSYISYWAYWGQGTLVTVSSGGGGSGGGGSGGGGSQTVVT |
| | | | QEPSLTVSPGGTVTLTCGSSTGAVTSGNYPNWVQQKPGQAPRGLIGGTKF |
| | | | LAPGTPARFSGSLLGGKAALTLSGVQPEDEAEYYCVLWYSNRWVFGGGTK |
| | | | LTVL |
| 1136 | DLL BINDING DOMAIN | artificial | QVQLQESGPGLVKPSETLSLTCTVSGGSISSYYWSWIRQPPGKGLEWIGY |
| | | | VYYSGTTNYNPSLKSRVTISVDTSKNQFSLKLSSVTAADTAVYYCASIAV |
| | | | TGFYFDYWGQGTLVTVSSGGGGSGGGGSGGGGSEIVLTQSPGTLSLSPGE |
| | | | RVTLSCRASQRVNNNYLAWYQQRPGQAPRLLIYGASSRATGIPDRFSGSG |
| | | | SGTDFTLTISRLEPEDFAVYYCQQYDRSPLTFGGGTKLEIKSGGGGSEVQ |
| | | | LVESGGGLVQPGGSLRLSCAASGFTFNSYAMNWVRQAPGKGLEWVARIRS |
| | | | KYNNYATYYADSVKGRFTISRDDSKNTAYLQMNSLKTEDTAVYYCVRHGN |
| | | | FGNSYVSWWAYWGQGTLVTVSSGGGGSGGGGSGGGGSQTVVTQEPSLTVS |
| | | | PGGTVTLTCGSSTGAVTSGNYPNWVQQKPGQAPRGLIGGTKFLAPGTPAR |
| | | | FSGSLLGGKAALTLSGVQPEDEAEYYCVLWYSNRWVFGGGTKLTVL |
| 1137 | DLL BINDING DOMAIN | artificial | QVQLQESGPGLVKPSETLSLTCTVSGGSISSYYWSWIRQPPGKGLEWIGY |
| | | | IYYSGRTNYYPSLKSRVTISIDTSKNQFSLKLSSVTAADTAVYYCARIAV |
| | | | AGFFFDYWGQGTLVTVSSGGGGSGGGGSGGGGSEIVLTQSPGTLSLSPGE |
| | | | RATLSCRASQSVNKNYLAWYQQKPGQAPRLLIYGASSRATGIPDRFSGSG |
| | | | SGTDFTLTISRLEPEDFAVYYCQQYDRSPLTFGGGTKLEIKSGGGGSEVQ |
| | | | LVESGGGLVQPGGSLRLSCAASGFTFNSYAMNWVRQAPGKGLEWVARIRS |
| | | | KYNNYATYYADSVKGRFTISRDDSKNTAYLQMNSLKTEDTAVYYCVRHGN |
| | | | FGNSYVSWWAYWGQGTLVTVSSGGGGSGGGGSGGGGSQTVVTQEPSLTVS |
| | | | PGGTVTLTCGSSTGAVTSGNYPNWVQQKPGQAPRGLIGGTKFLAPGTPAR |
| | | | FSGSLLGGKAALTLSGVQPEDEAEYYCVLWYSNRWVFGGGTKLTVL |
| 1138 | DLL BINDING DOMAIN | artificial | QVQLQESGPGLVKPSETLSLTCTVSGASISSFYWSWIRQPPGKGLEWIGY |
| | | | IYYSGTTNYNPSLKSRVTISVDTSKNQFSLKLSSVTAADTAVYYCARIAV |
| | | | AGFFFDYWGQGTLVTVSSGGGGSGGGGSGGGGSEIVLTQSPGTLSLSPGE |
| | | | RATLSCRASQSVNKNYLAWYQQKPGQAPRLLIYGASSRATGIPDRFSGSG |
| | | | SGTDFTLTISRLEPEDFAVYYCQQYDRSPLTFGGGTKVEIKSGGGGSEVQ |
| | | | LVESGGGLVQPGGSLRLSCAASGFTFNSYAMNWVRQAPGKGLEWVARIRS |
| | | | KYNNYATYYADSVKGRFTISRDDSKNTAYLQMNSLKTEDTAVYYCVRHGN |
| | | | FGNSYVSWWAYWGQGTLVTVSSGGGGSGGGGSGGGGSQTVVTQEPSLTVS |
| | | | PGGTVTLTCGSSTGAVTSGNYPNWVQQKPGQAPRGLIGGTKFLAPGTPAR |
| | | | FSGSLLGGKAALTLSGVQPEDEAEYYCVLWYSNRWVFGGGTKLTVL |
| 1139 | DLL BINDING DOMAIN | artificial | QVQLQESGPGLVKPSQTLSLTCTVSGASISSFYWSWIRQPPGKGLEWIGY |
| | | | IYYSGTTNYNPSLKSRVTISVDTSKNQFSLKLSSVTAADTAVYYCARIAV |
| | | | AGFFFDYWGQGTLVTVSSGGGGSGGGGSGGGGSEIVLTQSPGTLSLSPGE |
| | | | RATLSCRASQSVNKNYLAWYQQKPGQAPRLLIYGASSRATGIPDRFSGSG |
| | | | SGTDFTLTISRLEPEDFAVYYCQQYDRSPLTFGGGTKVEIKSGGGGSEVQ |
| | | | LVESGGGLVQPGGSLRLSCAASGFTFNSYAMNWVRQAPGKGLEWVARIRS |
| | | | KYNNYATYYADSVKGRFTISRDDSKNTAYLQMNSLKTEDTAVYYCVRHGN |
| | | | FGNSYVSWWAYWGQGTLVTVSSGGGGSGGGGSGGGGSQTVVTQEPSLTVS |
| | | | PGGTVTLTCGSSTGAVTSGNYPNWVQQKPGQAPRGLIGGTKFLAPGTPAR |
| | | | FSGSLLGGKAALTLSGVQPEDEAEYYCVLWYSNRWVFGGGTKLTVL |
| 1140 | DLL BINDING DOMAIN | artificial | QVQLQEWGPGLVKPSETLSLTCTVSGASISSFYWSWIRQPPGKGLEWIGY |
| | | | IYYSGTTNYNPSLKSRVTISVDTSKNQLSLKLSSVTAADTAVYYCARIAV |
| | | | AGFFFDYWGQGTLVTVSSGGGGSGGGGSGGGGSEIVLTQSPGTLSLSPGE |
| | | | RATLSCRASQSVNKNYLAWYQQKPGQAPRLLIYGASSRATGIPDRFSGSG |
| | | | SGTDFTLTISRLEPEDFAVYYCQQYDRSPLTFGGGTKVDIKSGGGGSEVQ |
| | | | LVESGGGLVQPGGSLRLSCAASGFTFNSYAMNWVRQAPGKGLEWVARIRS |
| | | | KYNNYATYYADSVKGRFTISRDDSKNTAYLQMNSLKTEDTAVYYCVRHGN |
| | | | FGNSYVSWWAYWGQGTLVTVSSGGGGSGGGGSGGGGSQTVVTQEPSLTVS |
| | | | PGGTVTLTCGSSTGAVTSGNYPNWVQQKPGQAPRGLIGGTKFLAPGTPAR |
| | | | FSGSLLGGKAALTLSGVQPEDEAEYYCVLWYSNRWVFGGGTKLTVL |
| 1141 | DLL BINDING DOMAIN | artificial | QVQLQESGPGLVKPSETLSLTCTVSGASISSFYWSWIRQPPGKGLEWIGY |
| | | | IYYSGTTNYNPSLKSRVTISVDTSKNQFSLKLSSVTAADTAVYYCARIAV |
| | | | AGFFFDYWGQGTLVTVSSGGGGSGGGGSGGGGSEIVLTQSPGTLSLSPGE |
| | | | SATLSCRASQSVNKNYLAWYQQKPGQAPRLLIYGASSRATGIPDRFSGSG |
| | | | SGTDFTLTISRLEPEDFAVYYCQQYDRSPLTFGGGTRLEIKSGGGGSEVQ |
| | | | LVESGGGLVQPGGSLRLSCAASGFTFNSYAMNWVRQAPGKGLEWVARIRS |
| | | | KYNNYATYYADSVKGRFTISRDDSKNTAYLQMNSLKTEDTAVYYCVRHGN |
| | | | FGNSYVSWWAYWGQGTLVTVSSGGGGSGGGGSGGGGSQTVVTQEPSLTVS |
| | | | PGGTVTLTCGSSTGAVTSGNYPNWVQQKPGQAPRGLIGGTKFLAPGTPAR |
| | | | FSGSLLGGKAALTLSGVQPEDEAEYYCVLWYSNRWVFGGGTKLTVL |
| 1142 | DLL BINDING DOMAIN | artificial | QVQLQESGPGLVKPSQTLSLTCTVSGGSISSYYWSWIRQPPGKGLEWIGY |
| | | | IFYNGITNYNPSLKSRVTISLDTSKNQFSLKLSSVTAADTAKYYCARIHS |
| | | | GSFSFDYWDQGTLVTVSSGGGGSGGGGSGGGGSEIVMTQSPGTLSLSPGE |
| | | | RATLSCRASQSVSRGYLAWYQQKPGQAPRLLIYGASSRATDIPDRFSGSG |
| | | | SGTDFTLTISRLEPEDFAVYYCQQYDTSPITFGQGTKVEIKSGGGGSEVQ |
| | | | LVESGGGLVQPGGSLRLSCAASGFTFNSYAMNWVRQAPGKGLEWVARIRS |
| | | | KYNNYATYYADSVKGRFTISRDDSKNTAYLQMNSLKTEDTAVYYCVRHGN |
| | | | FGNSYVSWWAYWGQGTLVTVSSGGGGSGGGGSGGGGSQTVVTQEPSLTVS |
| | | | PGGTVTLTCGSSTGAVTSGNYPNWVQQKPGQAPRGLIGGTKFLAPGTPAR |
| | | | FSGSLLGGKAALTLSGVQPEDEAEYYCVLWYSNRWVFGGGTKLTVL |
| 1143 | DLL BINDING DOMAIN | artificial | QVQLQESGPGLVKPSETLSLTCTVSGGSISSYYWSWIRQPPGKCLEWIGY |
| | | | VYYSGTTNYNPSLKSRVTISVDTSKNQFSLKLSSVTAADTAVYYCASIAV |
| | | | TGFYFDYWGQGTLVTVSSGGGGSGGGGSGGGGSEIVLTQSPGTLSLSPGE |
| | | | RVTLSCRASQRVNNNYLAWYQQRPGQAPRLLIYGASSRATGIPDRFSGSG |
| | | | SGTDFTLTISRLEPEDFAVYYCQQYDRSPLTFGCGTKLEIKSGGGGSEVQ |
| | | | LVESGGGLVQPGGSLKLSCAASGFTFNKYAMNWVRQAPGKGLEWVARIRS |
| | | | KYNNYATYYADSVKDRFTISRDDSKNTAYLQMNNLKTEDTAVYYCVRHGN |
| | | | FGNSYISYWAYWGQGTLVTVSSGGGGSGGGGSGGGGSQTVVTQEPSLTVS |
| | | | PGGTVTLTCGSSTGAVTSGNYPNWVQQKPGQAPRGLIGGTKFLAPGTPAR |
| | | | FSGSLLGGKAALTLSGVQPEDEAEYYCVLWYSNRWVFGGGTKLTVL |
| 1144 | DLL BINDING DOMAIN | artificial | QVQLQESGPGLVKPSETLSLTCTVSGASISSFYWSWIRQPPGKCLEWIGY |
| | | | IYYSGTTNYNPSLKSRVTISVDTSKNQFSLKLSSVTAADTAVYYCARIAV |
| | | | AGFFFDYWGQGTLVTVSSGGGGSGGGGSGGGGSEIVLTQSPGTLSLSPGE |
| | | | RATLSCRASQSVNKNYLAWYQQKPGQAPRLLIYGASSRATGIPDRFSGSG |
| | | | SGTDFTLTISRLEPEDFAVYYCQQYDRSPLTFGCGTKVEIKSGGGGSEVQ |
| | | | LVESGGGLVQPGGSLKLSCAASGFTFNKYAMNWVRQAPGKGLEWVARIRS |
| | | | KYNNYATYYADSVKDRFTISRDDSKNTAYLQMNNLKTEDTAVYYCVRHGN |
| | | | FGNSYISYWAYWGQGTLVTVSSGGGGSGGGGSGGGGSQTVVTQEPSLTVS |
| | | | PGGTVTLTCGSSTGAVTSGNYPNWVQQKPGQAPRGLIGGTKFLAPGTPAR |
| | | | FSGSLLGGKAALTLSGVQPEDEAEYYCVLWYSNRWVFGGGTKLTVL |
| 1145 | DLL EPITOPE REGION | artificial | RVDRCSLQPCRNGGLCLDLGHALRCRCRAGFAGPRCE |
| 1146 | DLL3 CDR-H1 | artificial | SYYMH |
| 1147 | DLL3 CDR-H2 | artificial | IINPSDGSTNYAQNFQG |
| 1148 | DLL3 CDR-H3 | artificial | GGNSAFYSYYDMDV |
| 1149 | DLL3 CDR-L1 | artificial | RSSQSLVYRDGNTYLS |

| | | | |
|---|---|---|---|
| 1150 | DLL3 CDR-L2 | artificial | KVSNWQS |
| 1151 | DLL3 CDR-L3 | artificial | MQGTHWPPT |
| 1152 | DLL3 CDR-H1 | artificial | NYYMH |
| 1153 | DLL3 CDR-H2 | artificial | IINPSDGSTSYAQKFQG |
| 1154 | DLL3 CDR-H3 | artificial | GGNSAFYSYYDMDV |
| 1155 | DLL3 CDR-L1 | artificial | RSSQSLVYRDGNTYLS |
| 1156 | DLL3 CDR-L2 | artificial | KVSNWQS |
| 1157 | DLL3 CDR-L3 | artificial | MQGTHWPPT |
| 1158 | DLL3 CDR-H1 | artificial | GYYIH |
| 1159 | DLL3 CDR-H2 | artificial | IINPSDGSTSYGQNFQG |
| 1160 | DLL3 CDR-H3 | artificial | GGNSAFYSYYDMDV |
| 1161 | DLL3 CDR-L1 | artificial | RSSQSLAYRDGNTYLS |
| 1162 | DLL3 CDR-L2 | artificial | KVSNWQS |
| 1163 | DLL3 CDR-L3 | artificial | MQGTHWPPT |
| 1164 | DLL3 CDR-H1 | artificial | GHYMH |
| 1165 | DLL3 CDR-H2 | artificial | IINPSDGSTNYAQKFQG |
| 1166 | DLL3 CDR-H3 | artificial | GTTWHYSYYDMDV |
| 1167 | DLL3 CDR-L1 | artificial | RSSQSLVYRDGNTYLT |
| 1168 | DLL3 CDR-L2 | artificial | KVSNWQS |

| | | | |
|---|---|---|---|
| 1169 | DLL3 CDR-L3 | artificial | MQGTHWPPT |
| 1170 | DLL3 CDR-H1 | artificial | NYFMH |
| 1171 | DLL3 CDR-H2 | artificial | IINPSDGSTSYAQNFQG |
| 1172 | DLL3 CDR-H3 | artificial | GGNSAFYSYYDMDV |
| 1173 | DLL3 CDR-L1 | artificial | RSSQSLVYRDGNTYLS |
| 1174 | DLL3 CDR-L2 | artificial | RVSNWQS |
| 1175 | DLL3 CDR-L3 | artificial | MQGTYWPPT |
| 1176 | DLL3 CDR-H2 | artificial | IINPSEGSTSYAQKFQG |
| 1177 | DLL3 CDR-H2 | artificial | IINPSDASTSYAQKFQG |
| 1178 | DLL CDR-L1 | artificial | RSSQSLVYREGNTYLS |
| 1179 | DLL CDR-L1 | artificial | RSSQSLVYRDANTYLS |
| 1180 | DLL CDR-L1 | artificial | RSSQSLVYRDGQTYLS |
| 1181 | DLL CDR-L1 | artificial | RSSQSLVYRDGNAYLS |
| 1182 | DLL3 VH REGION | artificial | QVQLVQSGAEVKKPGASVKVSCKASGYTFTSYYMHWVRQAPGQGLEWMGI |
| | | | INPSDGSTNYAQNFQGRVTMTRDTSTNTVYMELSSLRSEDTAVYYCARGG |
| | | | NSAFYSYYDMDVWGQGTTVTVSS |
| 1183 | DLL3 VH REGION | artificial | QVQLVQSGAEVKKPGASVKVSCKASGYTFTNYYMHWVRQAPGLGLEWMGI |
| | | | INPSDGSTSYAQKFQGRVTMTRDTSTNTVYMDLSSLRSEDTAVYYCARGG |
| | | | NSAFYSYYDMDVWGQGTTVTVSS |
| 1184 | DLL3 VH REGION | artificial | QVQLVQSGAEVKKPGASVKVSCKASGYTFTGYYIHWVRQAPGQGLEWMGI |
| | | | INPSDGSTSYGQNFQGRVTMTRDTSTNTVYMELSSLRSEDTAVYYCARGG |
| | | | NSAFYSYYDMDVWGQGTTVTVSS |
| 1185 | DLL3 VH REGION | artificial | QVQLVQSGAEVKKPGASVKVSCKASGYTFTGHYMHWVRQAPGQGLEWMGI |
| | | | INPSDGSTNYAQKFQGRVTMTRDTSTSTVYMELRSLRSEDTAVYYCTRGT |
| | | | TVVHYSYYDMDVWGQGTTVTVSS |
| 1186 | DLL3 VH REGION | artificial | QVQLVQSGAEVKKPGASVKVSCKASGYTFTNYFMHWVRQAPGLGLEWMGI |
| | | | INPSDGSTSYAQNFQGRVTMTRDTSTNTVYMELSSLRSEDTAVYYCARGG |
| | | | NSAFYSYYDMDVWGQGTTVTVSS |
| 1187 | DLL3 VH REGION | artificial | QVQLVQSGAEVKKPGASVKVSCKASGYTFTNYYMHWVRQAPGQGLEWMGI |
| | | | INPSDGSTSYAQKFQGRVTMTRDTSTNTVYMDLSSLRSEDTAVYYCARGG |
| | | | NSAFYSYYDMDVWGQGTTVTVSS |
| 1188 | DLL3 VH REGION | artificial | QVQLVQSGAEVKKPGASVKVSCKASGYTFTNYYMHWVRQAPGLGLEWMGI |
| | | | INPSEGSTSYAQKFQGRVTMTRDTSTNTVYMDLSSLRSEDTAVYYCARGG |
| | | | NSAFYSYYDMDVWGQGTTVTVSS |
| 1189 | DLL3 VH REGION | artificial | QVQLVQSGAEVKKPGASVKVSCKASGYTFTNYYMHWVRQAPGLGLEWMGI |
| | | | INPSDASTSYAQKFQGRVTMTRDTSTNTVYMDLSSLRSEDTAVYYCARGG |
| | | | NSAFYSYYDMDVWGQGTTVTVSS |
| 1190 | DLL3 VH REGION | artificial | QVQLVQSGAEVKKPGASVKVSCKASGYTFTNYYMHWVRQAPGQGLEWMGI |
| | | | INPSEGSTSYAQKFQGRVTMTRDTSTNTVYMDLSSLRSEDTAVYYCARGG |
| | | | NSAFYSYYDMDVWGQGTTVTVSS |
| 1191 | DLL3 VH REGION | artificial | QVQLVQSGAEVKKPGASVKVSCKASGYTFTNYYMHWVRQAPGQGLEWMGI |
| | | | INPSDASTSYAQKFQGRVTMTRDTSTNTVYMDLSSLRSEDTAVYYCARGG |
| | | | NSAFYSYYDMDVWGQGTTVTVS |
| 1192 | DLL3 VH REGION | artificial | QVQLVQSGAEVKKPGASVKVSCKASGYTFTNYYMHWVRQAPGLCLEWMGI |
| | | | INPSDGSTSYAQKFQGRVTMTRDTSTNTVYMDLSSLRSEDTAVYYCARGG |
| | | | NSAFYSYYDMDVWGQGTTVTVSS |
| 1193 | DLL3 VH REGION | artificial | QVQLVQSGAEVKKPGASVKVSCKASGYTFTNYYMHWVRQAPGQCLEWMGI |
| | | | INPSDGSTSYAQKFQGRVTMTRDTSTNTVYMDLSSLRSEDTAVYYCARGG |
| | | | NSAFYSYYDMDVWGQGTTVTVSS |
| 1194 | DLL3 VH REGION | artificial | QVQLVQSGAEVKKPGASVKVSCKASGYTFTNYYMHWVRQAPGLCLEWMGI |
| | | | INPSEGSTSYAQKFQGRVTMTRDTSTNTVYMDLSSLRSEDTAVYYCARGG |
| | | | NSAFYSYYDMDVWGQGTTVTVSS |
| 1195 | DLL3 VH REGION | artificial | QVQLVQSGAEVKKPGASVKVSCKASGYTFTNYYMHWVRQAPGLCLEWMGI |
| | | | INPSDASTSYAQKFQGRVTMTRDTSTNTVYMDLSSLRSEDTAVYYCARGG |
| | | | NSAFYSYYDMDVWGQGTTVTVSS |
| 1196 | DLL3 VH REGION | artificial | QVQLVQSGAEVKKPGASVKVSCKASGYTFTNYYMHWVRQAPGQCLEWMGI |
| | | | INPSEGSTSYAQKFQGRVTMTRDTSTNTVYMDLSSLRSEDTAVYYCARGG |
| | | | NSAFYSYYDMDVWGQGTTVTVSS |
| 1197 | DLL3 VH REGION | artificial | QVQLVQSGAEVKKPGASVKVSCKASGYTFTNYYMHWVRQAPGQCLEWMGI |
| | | | INPSDASTSYAQKFQGRVTMTRDTSTNTVYMDLSSLRSEDTAVYYCARGG |
| | | | NSAFYSYYDMDVWGQGTTVTVSS |
| 1198 | DLL3 VL REGION | artificial | DVVMTQSPLSLPVTLGQPASISCRSSQSLVYRDGNTYLSWFQQRPGQSPR |
| | | | RLIYKVSNWQSGVPDRFSGSGSGTDFTLKISRVEAEDVGVYFCMQGTHWP |
| | | | PTFGQGTKVEIK |
| 1199 | DLL3 VL REGION | artificial | DVVMTQTPLSLPVTLGQPASISCRSSQSLVYRDGNTYLSWFQQRPGQSPR |
| | | | RLIYKVSNWQSGVPDRFSGGGSGTDFTLKISRVEAEDVGVYYCMQGTHWP |
| | | | PTFGQGTKVEIK |
| 1200 | DLL3 VL REGION | artificial | DVVMTQSPLSLPVTLGQPASISCRSSQSLAYRDGNTYLSWFQQRPGQSPR |
| | | | RLIYKVSNWQSGVPDRFSGSGSGTDFTLKISRVEAEDVGVYFCMQGTHWP |
| | | | PTFGQGTKVEIK |
| 1201 | DLL3 VL REGION | artificial | DVVMTQTPLSLPVTLGQPASISCRSSQSLVYRDGNTYLTWFQQRPGQSPR |
| | | | RLIYKVSNWQSGVPDRFSGSGSGTDFTLKISRVEAEDVGVYYCMQGTHWP |
| | | | PTFGGGTKVEIK |
| 1202 | DLL3 VL REGION | artificial | DVVMTQSPLSLPVTLGQPASISCRSSQSLVYRDGNTYLSWFQQRPGQSPR |
| | | | RLIYRVSNWQSGVPDRFSGSGSGTDFTLKISRVEAEDVGVYFCMQGTYWP |
| | | | PTFGQGTKVDIK |
| 1203 | DLL3 VL REGION | artificial | DVVMTQTPLSLPVTLGQPASISCRSSQSLVYREGNTYLSWFQQRPGQSPR |
| | | | RLIYKVSNWQSGVPDRFSGGGSGTDFTLKISRVEAEDVGVYYCMQGTHWP |
| | | | PTFGQGTKVEIK |
| 1204 | DLL3 VL REGION | artificial | DWMTQTPLSLPVTLGQPASISCRSSQSLVYRDANTYLSWFQQRPGQSPR |
| | | | RLIYKVSNWQSGVPDRFSGGGSGTDFTLKISRVEAEDVGVYYCMQGTHWP |
| | | | PTFGQGTKVEIK |
| 1205 | DLL3 VL REGION | artificial | DWMTQTPLSLPVTLGQPASISCRSSQSLVYRDGQTYLSWFQQRPGQSPR |
| | | | RLIYKVSNWQSGVPDRFSGGGSGTDFTLKISRVEAEDVGVYYCMQGTHWP |
| | | | PTFGQGTKVEIK |
| 1206 | DLL3 VL REGION | artificial | DVVMTQTPLSLPVTLGQPASISCRSSQSLVYRDGNAYLSWFQQRPGQSPR |
| | | | RLIYKVSNWQSGVPDRFSGGGSGTDFTLKISRVEAEDVGVYYCMQGTHWP |
| | | | PTFGQGTKVEIK |
| 1207 | DLL3 VL REGION | artificial | DWMTQTPLSLPVTLGQPASISCRSSQSLVYRDGNTYLSWFQQRPGQSPR |
| | | | RLIYKVSNWQSGVPDRFSGSGSGTDFTLKISRVEAEDVGVYYCMQGTHWP |
| | | | PTFGQGTKVEIK |
| 1208 | DLL3 VL REGION | artificial | DVVMTQTPLSLPVTLGQPASISCRSSQSLVYREGNTYLSWFQQRPGQSPR |
| | | | RLIYKVSNWQSGVPDRFSGSGSGTDFTLKISRVEAEDVGVYYCMQGTHWP |
| | | | PTFGQGTKVEIK |
| 1209 | DLL3 VL REGION | artificial | DWMTQTPLSLPVTLGQPASISCRSSQSLVYRDANTYLSWFQQRPGQSPR |
| | | | RLIYKVSNWQSGVPDRFSGSGSGTDFTLKISRVEAEDVGVYYCMQGTHWP |
| | | | PTFGQGTKVEIK |
| 1210 | DLL3 VL REGION | artificial | DVVMTQTPLSLPVTLGQPASISCRSSQSLVYRDGNTYLSWFQQRPGQSPR |
| | | | RLIYKVSNWQSGVPDRFSGGGSGTDFTLKISRVEAEDVGVYYCMQGTHWP |
| | | | PTFGCGTKVEIK |
| 1211 | DLL3 VL REGION | artificial | DVVMTQTPLSLPVTLGQPASISCRSSQSLVYREGNTYLSWFQQRPGQSPR |
| | | | RLIYKVSNWQSGVPDRFSGGGSGTDFTLKISRVEAEDVGVYYCMQGTHWP |
| | | | PTFGCGTKVEIK |
| 1212 | DLL3 VL REGION | artificial | DWMTQTPLSLPVTLGQPASISCRSSQSLVYRDANTYLSWFQQRPGQSPR |
| | | | RLIYKVSNWQSGVPDRFSGGGSGTDFTLKISRVEAEDVGVYYCMQGTHWP |
| | | | PTFGCGTKVEIK |
| 1213 | DLL3 VL REGION | artificial | DWMTQTPLSLPVTLGQPASISCRSSQSLVYRDGQTYLSWFQQRPGQSPR |
| | | | RLIYKVSNWQSGVPDRFSGGGSGTDFTLKISRVEAEDVGVYYCMQGTHWP |
| | | | PTFGCGTKVEIK |
| 1214 | DLL3 VL REGION | artificial | DWMTQTPLSLPVTLGQPASISCRSSQSLVYRDGNAYLSWFQQRPGQSPR |
| | | | RLIYKVSNWQSGVPDRFSGGGSGTDFTLKISRVEAEDVGVYYCMQGTHWP |
| | | | PTFGCGTKVEIK |
| 1215 | DLL3 VL REGION | artificial | DWMTQTPLSLPVTLGQPASISCRSSQSLVYRDGNTYLSWFQQRPGQSPR |
| | | | RLIYKVSNWQSGVPDRFSGSGSGTDFTLKISRVEAEDVGVYYCMQGTHWP |
| | | | PTFGCGTKVEIK |
| 1216 | DLL3 VL REGION | artificial | DWMTQTPLSLPVTLGQPASISCRSSQSLVYREGNTYLSWFQQRPGQSPR |
| | | | RLIYKVSNWQSGVPDRFSGSGSGTDFTLKISRVEAEDVGVYYCMQGTHWP |
| | | | PTFGCGTKVEIK |
| 1217 | DLL3 VL REGION | artificial | DVVMTQTPLSLPVTLGQPASISCRSSQSLVYRDANTYLSWFQQRPGQSPR |
| | | | RLIYKVSNWQSGVPDRFSGSGSGTDFTLKISRVEAEDVGVYYCMQGTHWP |
| | | | PTFGCGTKVEIK |
| 1218 | DLL3 ANTIBODY | artificial | QVQLVQSGAEVKKPGASVKVSCKASGYTFTSYYMHWVRQAPGQGLEWMGI |
| | CONSTRUCT BINDING | | INPSDGSTNYAQNFQGRVTMTRDTSTNTVYMELSSLRSEDTAVYYCARGG |
| | DOMAIN | | NSAFYSYYDMDVWGQGTTVTVSSGGGGSGGGGSGGGGSDVVMTQSPLSLP |
| | | | VTLGQPASISCRSSQSLVYRDGNTYLSWFQQRPGQSPRRLIYKVSNWQSG |
| | | | VPDRFSGSGSGTDFTLKISRVEAEDVGVYFCMQGTHWPPTFGQGTKVEIK |
| 1219 | DLL3 ANTIBODY | artificial | QVQLVQSGAEVKKPGASVKVSCKASGYTFTNYYMHWVRQAPGLGLEWMGI |
| | CONSTRUCT BINDING | | INPSDGSTSYAQKFQGRVTMTRDTSTNTVYMDLSSLRSEDTAVYYCARGG |
| | DOMAIN | | NSAFYSYYDMDVWGQGTTVTVSSGGGGSGGGGSGGGGSDVVMTQTPLSLP |
| | | | VTLGQPASISCRSSQSLVYRDGNTYLSWFQQRPGQSPRRLIYKVSNWQSG |
| | | | VPDRFSGGGSGTDFTLKISRVEAEDVGVYYCMQGTHWPPTFGQGTKVEIK |
| 1220 | DLL3 ANTIBODY | artificial | QVQLVQSGAEVKKPGASVKVSCKASGYTFTGYYIHWVRQAPGQGLEWMGI |
| | CONSTRUCT BINDING | | INPSDGSTSYGQNFQGRVTMTRDTSTNTVYMELSSLRSEDTAVYYCARGG |
| | DOMAIN | | NSAFYSYYDMDVWGQGTTVTVSSGGGGSGGGGSGGGGSDVVMTQSPLSLP |
| | | | VTLGQPASISCRSSQSLAYRDGNTYLSWFQQRPGQSPRRLIYKVSNWQSG |
| | | | VPDRFSGSGSGTDFTLKISRVEAEDVGVYFCMQGTHWPPTFGQGTKVEIK |
| 1221 | DLL3 ANTIBODY | artificial | QVQLVQSGAEVKKPGASVKVSCKASGYTFTGHYMHWVRQAPGQGLEWMGI |
| | CONSTRUCT BINDING | | INPSDGSTNYAQKFQGRVTMTRDTSTSTVYMELRSLRSEDTAVYYCTRGT |
| | DOMAIN | | TVVHYSYYDMDVWGQGTTVTVSSGGGGSGGGGSGGGGSDVVMTQTPLSLP |
| | | | VTLGQPASISCRSSQSLVYRDGNTYLTWFQQRPGQSPRRLIYKVSNWQSG |
| | | | VPDRFSGSGSGTDFTLKISRVEAEDVGVYYCMQGTHWPPTFGGGTKVEIK |
| 1222 | DLL3 ANTIBODY | artificial | QVQLVQSGAEVKKPGASVKVSCKASGYTFTNYFMHWVRQAPGLGLEWMGI |
| | CONSTRUCT BINDING | | INPSDGSTSYAQNFQGRVTMTRDTSTNTVYMELSSLRSEDTAVYYCARGG |
| | DOMAIN | | NSAFYSYYDMDVWGQGTTVTVSSGGGGSGGGGSGGGGSDVVMTQSPLSLP |
| | | | VTLGQPASISCRSSQSLVYRDGNTYLSWFQQRPGQSPRRLIYRVSNWQSG |
| | | | VPDRFSGSGSGTDFTLKISRVEAEDVGVYFCMQGTYWPPTFGQGTKVDIK |
| 1223 | DLL3 ANTIBODY | artificial | QVQLVQSGAEVKKPGASVKVSCKASGYTFTNYYMHWVRQAPGLGLEWMGI |
| | CONSTRUCT BINDING | | INPSDGSTSYAQKFQGRVTMTRDTSTNTVYMDLSSLRSEDTAVYYCARGG |
| | DOMAIN | | NSAFYSYYDMDVWGQGTTVTVSSGGGGSGGGGSGGGGSDVVMTQTPLSLP |
| | | | VTLGQPASISCRSSQSLVYREGNTYLSWFQQRPGQSPRRLIYKVSNWQSG |
| | | | VPDRFSGGGSGTDFTLKISRVEAEDVGVYYCMQGTHWPPTFGQGTKVEIK |
| 1224 | DLL3 ANTIBODY | artificial | QVQLVQSGAEVKKPGASVKVSCKASGYTFTNYYMHWVRQAPGLGLEWMGI |
| | CONSTRUCT BINDING | | INPSDGSTSYAQKFQGRVTMTRDTSTNTVYMDLSSLRSEDTAVYYCARGG |
| | DOMAIN | | NSAFYSYYDMDVWGQGTTVTVSSGGGGSGGGGSGGGGSDVVMTQTPLSLP |
| | | | VTLGQPASISCRSSQSLVYRDANTYLSWFQQRPGQSPRRLIYKVSNWQSG |
| | | | VPDRFSGGGSGTDFTLKISRVEAEDVGVYYCMQGTHWPPTFGQGTKVEIK |
| 1225 | DLL3 ANTIBODY | artificial | QVQLVQSGAEVKKPGASVKVSCKASGYTFTNYYMHWVRQAPGLGLEWMGI |
| | CONSTRUCT BINDING | | INPSDGSTSYAQKFQGRVTMTRDTSTNTVYMDLSSLRSEDTAVYYCARGG |
| | DOMAIN | | NSAFYSYYDMDVWGQGTTVTVSSGGGGSGGGGSGGGGSDVVMTQTPLSLP |
| | | | VTLGQPASISCRSSQSLVYRDGQTYLSWFQQRPGQSPRRLIYKVSNWQSG |
| | | | VPDRFSGGGSGTDFTLKISRVEAEDVGVYYCMQGTHWPPTFGQGTKVEIK |
| 1226 | DLL3 ANTIBODY | artificial | QVQLVQSGAEVKKPGASVKVSCKASGYTFTNYYMHWVRQAPGLGLEWMGI |
| | CONSTRUCT BINDING | | INPSDGSTSYAQKFQGRVTMTRDTSTNTVYMDLSSLRSEDTAVYYCARGG |
| | DOMAIN | | NSAFYSYYDMDVWGQGTTVTVSSGGGGSGGGGSGGGGSDVVMTQTPLSLP |
| | | | VTLGQPASISCRSSQSLVYRDGNAYLSWFQQRPGQSPRRLIYKVSNWQSG |
| | | | VPDRFSGGGSGTDFTLKISRVEAEDVGVYYCMQGTHWPPTFGQGTKVEIK |
| 1227 | DLL3 ANTIBODY | artificial | QVQLVQSGAEVKKPGASVKVSCKASGYTFTNYYMHWVRQAPGLGLEWMGI |
| | CONSTRUCT BINDING | | INPSDGSTSYAQKFQGRVTMTRDTSTNTVYMDLSSLRSEDTAVYYCARGG |
| | DOMAIN | | NSAFYSYYDMDVWGQGTTVTVSSGGGGSGGGGSGGGGSDVVMTQTPLSLP |
| | | | VTLGQPASISCRSSQSLVYRDGNTYLSWFQQRPGQSPRRLIYKVSNWQSG |
| | | | VPDRFSGSGSGTDFTLKISRVEAEDVGVYYCMQGTHWPPTFGQGTKVEIK |
| 1228 | DLL3 ANTIBODY | artificial | QVQLVQSGAEVKKPGASVKVSCKASGYTFTNYYMHWVRQAPGQGLEWMGI |
| | CONSTRUCT BINDING | | INPSDGSTSYAQKFQGRVTMTRDTSTNTVYMDLSSLRSEDTAVYYCARGG |
| | DOMAIN | | NSAFYSYYDMDVWGQGTTVTVSSGGGGSGGGGSGGGGSDVVMTQTPLSLP |
| | | | VTLGQPASISCRSSQSLVYRDGNTYLSWFQQRPGQSPRRLIYKVSNWQSG |
| | | | VPDRFSGGGSGTDFTLKISRVEAEDVGVYYCMQGTHWPPTFGQGTKVEIK |
| 1229 | DLL3 ANTIBODY | artificial | QVQLVQSGAEVKKPGASVKVSCKASGYTFTNYYMHWVRQAPGLGLEWMGI |
| | CONSTRUCT BINDING | | INPSEGSTSYAQKFQGRVTMTRDTSTNTVYMDLSSLRSEDTAVYYCARGG |
| | DOMAIN | | NSAFYSYYDMDVWGQGTTVTVSSGGGGSGGGGSGGGGSDVVMTQTPLSLP |
| | | | VTLGQPASISCRSSQSLVYRDGNTYLSWFQQRPGQSPRRLIYKVSNWQSG |
| | | | VPDRFSGGGSGTDFTLKISRVEAEDVGVYYCMQGTHWPPTFGQGTKVEIK |
| 1230 | DLL3 ANTIBODY | artificial | QVQLVQSGAEVKKPGASVKVSCKASGYTFTNYYMHWVRQAPGLGLEWMGI |
| | CONSTRUCT BINDING | | INPSDASTSYAQKFQGRVTMTRDTSTNTVYMDLSSLRSEDTAVYYCARGG |
| | DOMAIN | | NSAFYSYYDMDVWGQGTTVTVSSGGGGSGGGGSGGGGSDVVMTQTPLSLP |
| | | | VTLGQPASISCRSSQSLVYRDGNTYLSWFQQRPGQSPRRLIYKVSNWQSG |
| | | | VPDRFSGGGSGTDFTLKISRVEAEDVGVYYCMQGTHWPPTFGQGTKVEIK |
| 1231 | DLL3 ANTIBODY | artificial | QVQLVQSGAEVKKPGASVKVSCKASGYTFTNYYMHWVRQAPGQGLEWMGI |
| | CONSTRUCT BINDING | | INPSDGSTSYAQKFQGRVTMTRDTSTNTVYMDLSSLRSEDTAVYYCARGG |
| | DOMAIN | | NSAFYSYYDMDVWGQGTTVTVSSGGGGSGGGGSGGGGSDVVMTQTPLSLP |
| | | | VTLGQPASISCRSSQSLVYRDGNTYLSWFQQRPGQSPRRLIYKVSNWQSG |
| | | | VPDRFSGSGSGTDFTLKISRVEAEDVGVYYCMQGTHWPPTFGQGTKVEIK |
| 1232 | DLL3 ANTIBODY | artificial | QVQLVQSGAEVKKPGASVKVSCKASGYTFTNYYMHWVRQAPGQGLEWMGI |
| | CONSTRUCT BINDING | | INPSEGSTSYAQKFQGRVTMTRDTSTNTVYMDLSSLRSEDTAVYYCARGG |
| | DOMAIN | | NSAFYSYYDMDVWGQGTTVTVSSGGGGSGGGGSGGGGSDVVMTQTPLSLP |
| | | | VTLGQPASISCRSSQSLVYREGNTYLSWFQQRPGQSPRRLIYKVSNWQSG |
| | | | VPDRFSGSGSGTDFTLKISRVEAEDVGVYYCMQGTHWPPTFGQGTKVEIK |
| 1233 | DLL3 ANTIBODY | artificial | QVQLVQSGAEVKKPGASVKVSCKASGYTFTNYYMHWVRQAPGQGLEWMGI |
| | CONSTRUCT BINDING | | INPSDASTSYAQKFQGRVTMTRDTSTNTVYMDLSSLRSEDTAVYYCARGG |
| | DOMAIN | | NSAFYSYYDMDVWGQGTTVTVSSGGGGSGGGGSGGGGSDVVMTQTPLSLP |
| | | | VTLGQPASISCRSSQSLVYRDANTYLSWFQQRPGQSPRRLIYKVSNWQSG |
| | | | VPDRFSGSGSGTDFTLKISRVEAEDVGVYYCMQGTHWPPTFGQGTKVEIK |
| 1234 | DLL3 ANTIBODY | artificial | QVQLVQSGAEVKKPGASVKVSCKASGYTFTNYYMHWVRQAPGLCLEWMGI |
| | CONSTRUCT BINDING | | INPSDGSTSYAQKFQGRVTMTRDTSTNTVYMDLSSLRSEDTAVYYCARGG |
| | DOMAIN | | NSAFYSYYDMDVWGQGTTVTVSSGGGGSGGGGSGGGGSDVVMTQTPLSLP |
| | | | VTLGQPASISCRSSQSLVYRDGNTYLSWFQQRPGQSPRRLIYKVSNWQSG |
| | | | VPDRFSGGGSGTDFTLKISRVEAEDVGVYYCMQGTHWPPTFGCGTKVEIK |
| 1235 | DLL3 ANTIBODY | artificial | QVQLVQSGAEVKKPGASVKVSCKASGYTFTNYYMHWVRQAPGLCLEWMGI |
| | CONSTRUCT BINDING | | INPSDGSTSYAQKFQGRVTMTRDTSTNTVYMDLSSLRSEDTAVYYCARGG |
| | DOMAIN | | NSAFYSYYDMDVWGQGTTVTVSSGGGGSGGGGSGGGGSDVVMTQTPLSLP |
| | | | VTLGQPASISCRSSQSLVYREGNTYLSWFQQRPGQSPRRLIYKVSNWQSG |
| | | | VPDRFSGGGSGTDFTLKISRVEAEDVGVYYCMQGTHWPPTFGCGTKVEIK |
| 1236 | DLL3 ANTIBODY | artificial | QVQLVQSGAEVKKPGASVKVSCKASGYTFTNYYMHWVRQAPGLCLEWMGI |
| | CONSTRUCT BINDING | | INPSDGSTSYAQKFQGRVTMTRDTSTNTVYMDLSSLRSEDTAVYYCARGG |
| | DOMAIN | | NSAFYSYYDMDVWGQGTTVTVSSGGGGSGGGGSGGGGSDVVMTQTPLSLP |
| | | | VTLGQPASISCRSSQSLVYRDANTYLSWFQQRPGQSPRRLIYKVSNWQSG |
| | | | VPDRFSGGGSGTDFTLKISRVEAEDVGVYYCMQGTHWPPTFGCGTKVEIK |
| 1237 | DLL3 ANTIBODY | artificial | QVQLVQSGAEVKKPGASVKVSCKASGYTFTNYYMHWVRQAPGLCLEWMGI |
| | CONSTRUCT BINDING | | INPSDGSTSYAQKFQGRVTMTRDTSTNTVYMDLSSLRSEDTAVYYCARGG |
| | DOMAIN | | NSAFYSYYDMDVWGQGTTVTVSSGGGGSGGGGSGGGGSDVVMTQTPLSLP |
| | | | VTLGQPASISCRSSQSLVYRDGQTYLSWFQQRPGQSPRRLIYKVSNWQSG |
| | | | VPDRFSGGGSGTDFTLKISRVEAEDVGVYYCMQGTHWPPTFGCGTKVEIK |
| 1238 | DLL3 ANTIBODY | artificial | QVQLVQSGAEVKKPGASVKVSCKASGYTFTNYYMHWVRQAPGLCLEWMGI |
| | CONSTRUCT BINDING | | INPSDGSTSYAQKFQGRVTMTRDTSTNTVYMDLSSLRSEDTAVYYCARGG |
| | DOMAIN | | NSAFYSYYDMDVWGQGTTVTVSSGGGGSGGGGSGGGGSDVVMTQTPLSLP |
| | | | VTLGQPASISCRSSQSLVYRDGNAYLSWFQQRPGQSPRRLIYKVSNWQSG |
| | | | VPDRFSGGGSGTDFTLKISRVEAEDVGVYYCMQGTHWPPTFGCGTKVEIK |
| 1239 | DLL3 ANTIBODY | artificial | QVQLVQSGAEVKKPGASVKVSCKASGYTFTNYYMHWVRQAPGLCLEWMGI |
| | CONSTRUCT BINDING | | INPSDGSTSYAQKFQGRVTMTRDTSTNTVYMDLSSLRSEDTAVYYCARGG |
| | DOMAIN | | NSAFYSYYDMDVWGQGTTVTVSSGGGGSGGGGSGGGGSDVVMTQTPLSLP |
| | | | VTLGQPASISCRSSQSLVYRDGNTYLSWFQQRPGQSPRRLIYKVSNWQSG |
| | | | VPDRFSGSGSGTDFTLKISRVEAEDVGVYYCMQGTHWPPTFGCGTKVEIK |
| 1240 | DLL3 ANTIBODY | artificial | QVQLVQSGAEVKKPGASVKVSCKASGYTFTNYYMHWVRQAPGQCLEWMGI |
| | CONSTRUCT BINDING | | INPSDGSTSYAQKFQGRVTMTRDTSTNTVYMDLSSLRSEDTAVYYCARGG |
| | DOMAIN | | NSAFYSYYDMDVWGQGTTVTVSSGGGGSGGGGSGGGGSDVVMTQTPLSLP |
| | | | VTLGQPASISCRSSQSLVYRDGNTYLSWFQQRPGQSPRRLIYKVSNWQSG |
| | | | VPDRFSGGGSGTDFTLKISRVEAEDVGVYYCMQGTHWPPTFGCGTKVEIK |
| 1241 | DLL3 ANTIBODY | artificial | QVQLVQSGAEVKKPGASVKVSCKASGYTFTNYYMHWVRQAPGLCLEWMGI |
| | CONSTRUCT BINDING | | INPSEGSTSYAQKFQGRVTMTRDTSTNTVYMDLSSLRSEDTAVYYCARGG |
| | DOMAIN | | NSAFYSYYDMDVWGQGTTVTVSSGGGGSGGGGSGGGGSDVVMTQTPLSLP |
| | | | VTLGQPASISCRSSQSLVYRDGNTYLSWFQQRPGQSPRRLIYKVSNWQSG |
| | | | VPDRFSGGGSGTDFTLKISRVEAEDVGVYYCMQGTHWPPTFGCGTKVEIK |
| 1242 | DLL3 ANTIBODY | artificial | QVQLVQSGAEVKKPGASVKVSCKASGYTFTNYYMHWVRQAPGLCLEWMGI |
| | CONSTRUCT BINDING | | INPSDASTSYAQKFQGRVTMTRDTSTNTVYMDLSSLRSEDTAVYYCARGG |
| | DOMAIN | | NSAFYSYYDMDVWGQGTTVTVSSGGGGSGGGGSGGGGSDVVMTQTPLSLP |
| | | | VTLGQPASISCRSSQSLVYRDGNTYLSWFQQRPGQSPRRLIYKVSNWQSG |
| | | | VPDRFSGGGSGTDFTLKISRVEAEDVGVYYCMQGTHWPPTFGCGTKVEIK |
| 1243 | DLL3 ANTIBODY | artificial | QVQLVQSGAEVKKPGASVKVSCKASGYTFTNYYMHWVRQAPGQCLEWMGI |
| | CONSTRUCT BINDING | | INPSDGSTSYAQKFQGRVTMTRDTSTNTVYMDLSSLRSEDTAVYYCARGG |
| | DOMAIN | | NSAFYSYYDMDVWGQGTTVTVSSGGGGSGGGGSGGGGSDVVMTQTPLSLP |
| | | | VTLGQPASISCRSSQSLVYRDGNTYLSWFQQRPGQSPRRLIYKVSNWQSG |
| | | | VPDRFSGSGSGTDFTLKISRVEAEDVGVYYCMQGTHWPPTFGCGTKVEIK |
| 1244 | DLL3 ANTIBODY | artificial | QVQLVQSGAEVKKPGASVKVSCKASGYTFTNYYMHWVRQAPGQCLEWMGI |
| | CONSTRUCT BINDING | | INPSEGSTSYAQKFQGRVTMTRDTSTNTVYMDLSSLRSEDTAVYYCARGG |
| | DOMAIN | | NSAFYSYYDMDVWGQGTTVTVSSGGGGSGGGGSGGGGSDVVMTQTPLSLP |
| | | | VTLGQPASISCRSSQSLVYREGNTYLSWFQQRPGQSPRRLIYKVSNWQSG |
| | | | VPDRFSGSGSGTDFTLKISRVEAEDVGVYYCMQGTHWPPTFGCGTKVEIK |
| 1245 | DLL3 ANTIBODY | artificial | QVQLVQSGAEVKKPGASVKVSCKASGYTFTNYYMHWVRQAPGQCLEWMGI |
| | CONSTRUCT BINDING | | INPSDASTSYAQKFQGRVTMTRDTSTNTVYMDLSSLRSEDTAVYYCARGG |
| | DOMAIN | | NSAFYSYYDMDVWGQGTTVTVSSGGGGSGGGGSGGGGSDVVMTQTPLSLP |
| | | | VTLGQPASISCRSSQSLVYRDANTYLSWFQQRPGQSPRRLIYKVSNWQSG |
| | | | VPDRFSGSGSGTDFTLKISRVEAEDVGVYYCMQGTHWPPTFGCGTKVEIK |
| 1246 | DLL3 ANTIBODY | artificial | QVQLVQSGAEVKKPGASVKVSCKASGYTFTSYYMHWVRQAPGQGLEWMGI |
| | CONSTRUCT BINDING | | INPSDGSTNYAQNFQGRVTMTRDTSTNTVYMELSSLRSEDTAVYYCARGG |
| | DOMAIN | | NSAFYSYYDMDVWGQGTTVTVSSGGGGSGGGGSGGGGSDVVMTQSPLSLP |
| | | | VTLGQPASISCRSSQSLVYRDGNTYLSWFQQRPGQSPRRLIYKVSNWQSG |
| | | | VPDRFSGSGSGTDFTLKISRVEAEDVGVYFCMQGTHWPPTFGQGTKVEIK |
| | | | SGGGGSEVQLVESGGGLVQPGGSLKLSCAASGFTFNKYAMNWVRQAPGKG |
| | | | LEWVARIRSKYNNYATYYADSVKDRFTISRDDSKNTAYLQMNNLKTEDTA |
| | | | VYYCVRHGNFGNSYISYWAYWGQGTLVTVSSGGGGSGGGGSGGGGSQTVV |
| | | | TQEPSLTVSPGGTVTLTCGSSTGAVTSGNYPNWVQQKPGQAPRGLIGGTK |
| | | | FLAPGTPARFSGSLLGGKAALTLSGVQPEDEAEYYCVLWYSNRWVFGGGT |
| | | | KLTVL |
| 1247 | DLL3 ANTIBODY | artificial | QVQLVQSGAEVKKPGASVKVSCKASGYTFTNYYMHWVRQAPGLGLEWMGI |
| | CONSTRUCT BINDING | | INPSDGSTSYAQKFQGRVTMTRDTSTNTVYMDLSSLRSEDTAVYYCARGG |
| | DOMAIN | | NSAFYSYYDMDVWGQGTTVTVSSGGGGSGGGGSGGGGSDVVMTQTPLSLP |
| | | | VTLGQPASISCRSSQSLVYRDGNTYLSWFQQRPGQSPRRLIYKVSNWQSG |
| | | | VPDRFSGGGSGTDFTLKISRVEAEDVGVYYCMQGTHWPPTFGQGTKVEIK |
| | | | SGGGGSEVQLVESGGGLVQPGGSLKLSCAASGFTFNKYAMNWVRQAPGKG |
| | | | LEWVARIRSKYNNYATYYADSVKDRFTISRDDSKNTAYLQMNNLKTEDTA |
| | | | VYYCVRHGNFGNSYISYWAYWGQGTLVTVSSGGGGSGGGGSGGGGSQTVV |
| | | | TQEPSLTVSPGGTVTLTCGSSTGAVTSGNYPNWVQQKPGQAPRGLIGGTK |
| | | | FLAPGTPARFSGSLLGGKAALTLSGVQPEDEAEYYCVLWYSNRWVFGGGT |
| | | | KLTVL |
| 1248 | DLL3 ANTIBODY | artificial | QVQLVQSGAEVKKPGASVKVSCKASGYTFTGYYIHWVRQAPGQGLEWMGI |
| | CONSTRUCT BINDING | | INPSDGSTSYGQNFQGRVTMTRDTSTNTVYMELSSLRSEDTAVYYCARGG |
| | DOMAIN | | NSAFYSYYDMDVWGQGTTVTVSSGGGGSGGGGSGGGGSDVVMTQSPLSLP |
| | | | VTLGQPASISCRSSQSLAYRDGNTYLSWFQQRPGQSPRRLIYKVSNWQSG |
| | | | VPDRFSGSGSGTDFTLKISRVEAEDVGVYFCMQGTHWPPTFGQGTKVEIK |
| | | | SGGGGSEVQLVESGGGLVQPGGSLKLSCAASGFTFNKYAMNWVRQAPGKG |
| | | | LEWVARIRSKYNNYATYYADSVKDRFTISRDDSKNTAYLQMNNLKTEDTA |
| | | | VYYCVRHGNFGNSYISYWAYWGQGTLVTVSSGGGGSGGGGSGGGGSQTVV |
| | | | TQEPSLTVSPGGTVTLTCGSSTGAVTSGNYPNWVQQKPGQAPRGLIGGTK |
| | | | FLAPGTPARFSGSLLGGKAALTLSGVQPEDEAEYYCVLWYSNRWVFGGGT |
| | | | KLTVL |
| 1249 | DLL3 ANTIBODY | artificial | QVQLVQSGAEVKKPGASVKVSCKASGYTFTGHYMHWVRQAPGQGLEWMGI |
| | CONSTRUCT BINDING | | INPSDGSTNYAQKFQGRVTMTRDTSTSTVYMELRSLRSEDTAVYYCTRGT |
| | DOMAIN | | TVVHYSYYDMDVWGQGTTVTVSSGGGGSGGGGSGGGGSDVVMTQTPLSLP |
| | | | VTLGQPASISCRSSQSLVYRDGNTYLTWFQQRPGQSPRRLIYKVSNWQSG |
| | | | VPDRFSGSGSGTDFTLKISRVEAEDVGVYYCMQGTHWPPTFGGGTKVEIK |
| | | | SGGGGSEVQLVESGGGLVQPGGSLKLSCAASGFTFNKYAMNWVRQAPGKG |
| | | | LEWVARIRSKYNNYATYYADSVKDRFTISRDDSKNTAYLQMNNLKTEDTA |
| | | | VYYCVRHGNFGNSYISYWAYWGQGTLVTVSSGGGGSGGGGSGGGGSQTVV |
| | | | TQEPSLTVSPGGTVTLTCGSSTGAVTSGNYPNWVQQKPGQAPRGLIGGTK |
| | | | FLAPGTPARFSGSLLGGKAALTLSGVQPEDEAEYYCVLWYSNRWVFGGGT |
| | | | KLTVL |
| 1250 | DLL3 ANTIBODY | artificial | QVQLVQSGAEVKKPGASVKVSCKASGYTFTNYFMHWVRQAPGLGLEWMGI |
| | CONSTRUCT BINDING | | INPSDGSTSYAQNFQGRVTMTRDTSTNTVYMELSSLRSEDTAVYYCARGG |
| | DOMAIN | | NSAFYSYYDMDVWGQGTTVTVSSGGGGSGGGGSGGGGSDVVMTQSPLSLP |
| | | | VTLGQPASISCRSSQSLVYRDGNTYLSWFQQRPGQSPRRLIYRVSNWQSG |
| | | | VPDRFSGSGSGTDFTLKISRVEAEDVGVYFCMQGTYWPPTFGQGTKVDIK |
| | | | SGGGGSEVQLVESGGGLVQPGGSLKLSCAASGFTFNKYAMNWVRQAPGKG |
| | | | LEWVARIRSKYNNYATYYADSVKDRFTISRDDSKNTAYLQMNNLKTEDTA |
| | | | VYYCVRHGNFGNSYISYWAYWGQGTLVTVSSGGGGSGGGGSGGGGSQTVV |
| | | | TQEPSLTVSPGGTVTLTCGSSTGAVTSGNYPNWVQQKPGQAPRGLIGGTK |
| | | | FLAPGTPARFSGSLLGGKAALTLSGVQPEDEAEYYCVLWYSNRWVFGGGT |
| | | | KLTVL |
| 1251 | DLL3 ANTIBODY | artificial | QVQLVQSGAEVKKPGASVKVSCKASGYTFTSYYMHWVRQAPGQGLEWMGI |
| | CONSTRUCT BINDING | | INPSDGSTNYAQNFQGRVTMTRDTSTNTVYMELSSLRSEDTAVYYCARGG |
| | DOMAIN | | NSAFYSYYDMDVWGQGTTVTVSSGGGGSGGGGSGGGGSDVVMTQSPLSLP |
| | | | VTLGQPASISCRSSQSLVYRDGNTYLSWFQQRPGQSPRRLIYKVSNWQSG |
| | | | VPDRFSGSGSGTDFTLKISRVEAEDVGVYFCMQGTHWPPTFGQGTKVEIK |
| | | | SGGGGSEVQLVESGGGLVQPGGSLRLSCAASGFTFNSYAMNWVRQAPGKG |
| | | | LEWVARIRSKYNNYATYYADSVKGRFTISRDDSKNTAYLQMNSLKTEDTA |
| | | | VYYCVRHGNFGNSYVSWWAYWGQGTLVTVSSGGGGSGGGGSGGGGSQTVV |
| | | | TQEPSLTVSPGGTVTLTCGSSTGAVTSGNYPNWVQQKPGQAPRGLIGGTK |
| | | | FLAPGTPARFSGSLLGGKAALTLSGVQPEDEAEYYCVLWYSNRWVFGGGT |
| | | | KLTVL |
| 1252 | DLL3 ANTIBODY | artificial | QVQLVQSGAEVKKPGASVKVSCKASGYTFTNYYMHWVRQAPGLGLEWMGI |
| | CONSTRUCT BINDING | | INPSDGSTSYAQKFQGRVTMTRDTSTNTVYMDLSSLRSEDTAVYYCARGG |
| | DOMAIN | | NSAFYSYYDMDVWGQGTTVTVSSGGGGSGGGGSGGGGSDVVMTQTPLSLP |
| | | | VTLGQPASISCRSSQSLVYRDGNTYLSWFQQRPGQSPRRLIYKVSNWQSG |
| | | | VPDRFSGGGSGTDFTLKISRVEAEDVGVYYCMQGTHWPPTFGQGTKVEIK |
| | | | SGGGGSEVQLVESGGGLVQPGGSLRLSCAASGFTFNSYAMNWVRQAPGKG |
| | | | LEWVARIRSKYNNYATYYADSVKGRFTISRDDSKNTAYLQMNSLKTEDTA |
| | | | VYYCVRHGNFGNSYVSWWAYWGQGTLVTVSSGGGGSGGGGSGGGGSQTVV |
| | | | TQEPSLTVSPGGTVTLTCGSSTGAVTSGNYPNWVQQKPGQAPRGLIGGTK |
| | | | FLAPGTPARFSGSLLGGKAALTLSGVQPEDEAEYYCVLWYSNRWVFGGGT |
| | | | KLTVL |
| 1253 | DLL3 ANTIBODY | artificial | QVQLVQSGAEVKKPGASVKVSCKASGYTFTGYYIHWVRQAPGQGLEWMGI |
| | CONSTRUCT BINDING | | INPSDGSTSYGQNFQGRVTMTRDTSTNTVYMELSSLRSEDTAVYYCARGG |
| | DOMAIN | | NSAFYSYYDMDVWGQGTTVTVSSGGGGSGGGGSGGGGSDVVMTQSPLSLP |
| | | | VTLGQPASISCRSSQSLAYRDGNTYLSWFQQRPGQSPRRLIYKVSNWQSG |
| | | | VPDRFSGSGSGTDFTLKISRVEAEDVGVYFCMQGTHWPPTFGQGTKVEIK |
| | | | SGGGGSEVQLVESGGGLVQPGGSLRLSCAASGFTFNSYAMNWVRQAPGKG |
| | | | LEWVARIRSKYNNYATYYADSVKGRFTISRDDSKNTAYLQMNSLKTEDTA |
| | | | VYYCVRHGNFGNSYVSWWAYWGQGTLVTVSSGGGGSGGGGSGGGGSQTVV |
| | | | TQEPSLTVSPGGTVTLTCGSSTGAVTSGNYPNWVQQKPGQAPRGLIGGTK |
| | | | FLAPGTPARFSGSLLGGKAALTLSGVQPEDEAEYYCVLWYSNRWVFGGGT |
| | | | KLTVL |
| 1254 | DLL3 ANTIBODY | artificial | QVQLVQSGAEVKKPGASVKVSCKASGYTFTNYYMHWVRQAPGLGLEWMGI |
| | CONSTRUCT BINDING | | INPSDGSTSYAQKFQGRVTMTRDTSTNTVYMDLSSLRSEDTAVYYCARGG |
| | DOMAIN | | NSAFYSYYDMDVWGQGTTVTVSSGGGGSGGGGSGGGGSDVVMTQTPLSLP |
| | | | VTLGQPASISCRSSQSLVYREGNTYLSWFQQRPGQSPRRLIYKVSNWQSG |
| | | | VPDRFSGGGSGTDFTLKISRVEAEDVGVYYCMQGTHWPPTFGQGTKVEIK |
| | | | SGGGGSEVQLVESGGGLVQPGGSLKLSCAASGFTFNKYAMNWVRQAPGKG |
| | | | LEWVARIRSKYNNYATYYADSVKDRFTISRDDSKNTAYLQMNNLKTEDTA |
| | | | VYYCVRHGNFGNSYISYWAYWGQGTLVTVSSGGGGSGGGGSGGGGSQTVV |
| | | | TQEPSLTVSPGGTVTLTCGSSTGAVTSGNYPNWVQQKPGQAPRGLIGGTK |
| | | | FLAPGTPARFSGSLLGGKAALTLSGVQPEDEAEYYCVLWYSNRWVFGGGT |
| | | | KLTVL |
| 1255 | DLL3 ANTIBODY | artificial | QVQLVQSGAEVKKPGASVKVSCKASGYTFTNYYMHWVRQAPGLGLEWMGI |
| | CONSTRUCT BINDING | | INPSDGSTSYAQKFQGRVTMTRDTSTNTVYMDLSSLRSEDTAVYYCARGG |
| | DOMAIN | | NSAFYSYYDMDVWGQGTTVTVSSGGGGSGGGGSGGGGSDVVMTQTPLSLP |
| | | | VTLGQPASISCRSSQSLVYRDANTYLSWFQQRPGQSPRRLIYKVSNWQSG |
| | | | VPDRFSGGGSGTDFTLKISRVEAEDVGVYYCMQGTHWPPTFGQGTKVEIK |
| | | | SGGGGSEVQLVESGGGLVQPGGSLKLSCAASGFTFNKYAMNWVRQAPGKG |
| | | | LEWVARIRSKYNNYATYYADSVKDRFTISRDDSKNTAYLQMNNLKTEDTA |
| | | | VYYCVRHGNFGNSYISYWAYWGQGTLVTVSSGGGGSGGGGSGGGGSQTVV |
| | | | TQEPSLTVSPGGTVTLTCGSSTGAVTSGNYPNWVQQKPGQAPRGLIGGTK |
| | | | FLAPGTPARFSGSLLGGKAALTLSGVQPEDEAEYYCVLWYSNRWVFGGGT |
| | | | KLTVL |
| 1256 | DLL3 ANTIBODY | artificial | QVQLVQSGAEVKKPGASVKVSCKASGYTFTNYYMHWVRQAPGLGLEWMGI |
| | CONSTRUCT BINDING | | INPSDGSTSYAQKFQGRVTMTRDTSTNTVYMDLSSLRSEDTAVYYCARGG |
| | DOMAIN | | NSAFYSYYDMDVWGQGTTVTVSSGGGGSGGGGSGGGGSDVVMTQTPLSLP |
| | | | VTLGQPASISCRSSQSLVYRDGQTYLSWFQQRPGQSPRRLIYKVSNWQSG |
| | | | VPDRFSGGGSGTDFTLKISRVEAEDVGVYYCMQGTHWPPTFGQGTKVEIK |
| | | | SGGGGSEVQLVESGGGLVQPGGSLKLSCAASGFTFNKYAMNWVRQAPGKG |
| | | | LEWVARIRSKYNNYATYYADSVKDRFTISRDDSKNTAYLQMNNLKTEDTA |
| | | | VYYCVRHGNFGNSYISYWAYWGQGTLVTVSSGGGGSGGGGSGGGGSQTVV |
| | | | TQEPSLTVSPGGTVTLTCGSSTGAVTSGNYPNWVQQKPGQAPRGLIGGTK |
| | | | FLAPGTPARFSGSLLGGKAALTLSGVQPEDEAEYYCVLWYSNRWVFGGGT |
| | | | KLTVL |
| 1257 | DLL3 ANTIBODY | artificial | QVQLVQSGAEVKKPGASVKVSCKASGYTFTNYYMHWVRQAPGLGLEWMGI |
| | CONSTRUCT BINDING | | INPSDGSTSYAQKFQGRVTMTRDTSTNTVYMDLSSLRSEDTAVYYCARGG |
| | DOMAIN | | NSAFYSYYDMDVWGQGTTVTVSSGGGGSGGGGSGGGGSDVVMTQTPLSLP |
| | | | VTLGQPASISCRSSQSLVYRDGNAYLSWFQQRPGQSPRRLIYKVSNWQSG |
| | | | VPDRFSGGGSGTDFTLKISRVEAEDVGVYYCMQGTHWPPTFGQGTKVEIK |
| | | | SGGGGSEVQLVESGGGLVQPGGSLKLSCAASGFTFNKYAMNWVRQAPGKG |
| | | | LEWVARIRSKYNNYATYYADSVKDRFTISRDDSKNTAYLQMNNLKTEDTA |
| | | | VYYCVRHGNFGNSYISYWAYWGQGTLVTVSSGGGGSGGGGSGGGGSQTVV |
| | | | TQEPSLTVSPGGTVTLTCGSSTGAVTSGNYPNWVQQKPGQAPRGLIGGTK |
| | | | FLAPGTPARFSGSLLGGKAALTLSGVQPEDEAEYYCVLWYSNRWVFGGGT |
| | | | KLTVL |
| 1258 | DLL3 ANTIBODY | artificial | QVQLVQSGAEVKKPGASVKVSCKASGYTFTNYYMHWVRQAPGLGLEWMGI |
| | CONSTRUCT BINDING | | INPSDGSTSYAQKFQGRVTMTRDTSTNTVYMDLSSLRSEDTAVYYCARGG |
| | DOMAIN | | NSAFYSYYDMDVWGQGTTVTVSSGGGGSGGGGSGGGGSDVVMTQTPLSLP |
| | | | VTLGQPASISCRSSQSLVYRDGNTYLSWFQQRPGQSPRRLIYKVSNWQSG |
| | | | VPDRFSGSGSGTDFTLKISRVEAEDVGVYYCMQGTHWPPTFGQGTKVEIK |
| | | | SGGGGSEVQLVESGGGLVQPGGSLKLSCAASGFTFNKYAMNWVRQAPGKG |
| | | | LEWVARIRSKYNNYATYYADSVKDRFTISRDDSKNTAYLQMNNLKTEDTA |
| | | | VYYCVRHGNFGNSYISYWAYWGQGTLVTVSSGGGGSGGGGSGGGGSQTVV |
| | | | TQEPSLTVSPGGTVTLTCGSSTGAVTSGNYPNWVQQKPGQAPRGLIGGTK |
| | | | FLAPGTPARFSGSLLGGKAALTLSGVQPEDEAEYYCVLWYSNRWVFGGGT |
| | | | KLTVL |
| 1259 | DLL3 ANTIBODY | artificial | QVQLVQSGAEVKKPGASVKVSCKASGYTFTNYYMHWVRQAPGQGLEWMGI |
| | CONSTRUCT BINDING | | INPSDGSTSYAQKFQGRVTMTRDTSTNTVYMDLSSLRSEDTAVYYCARGG |
| | DOMAIN | | NSAFYSYYDMDVWGQGTTVTVSSGGGGSGGGGSGGGGSDVVMTQTPLSLP |
| | | | VTLGQPASISCRSSQSLVYRDGNTYLSWFQQRPGQSPRRLIYKVSNWQSG |
| | | | VPDRFSGGGSGTDFTLKISRVEAEDVGVYYCMQGTHWPPTFGQGTKVEIK |
| | | | SGGGGSEVQLVESGGGLVQPGGSLKLSCAASGFTFNKYAMNWVRQAPGKG |
| | | | LEWVARIRSKYNNYATYYADSVKDRFTISRDDSKNTAYLQMNNLKTEDTA |
| | | | VYYCVRHGNFGNSYISYWAYWGQGTLVTVSSGGGGSGGGGSGGGGSQTVV |
| | | | TQEPSLTVSPGGTVTLTCGSSTGAVTSGNYPNWVQQKPGQAPRGLIGGTK |
| | | | FLAPGTPARFSGSLLGGKAALTLSGVQPEDEAEYYCVLWYSNRWVFGGGT |
| | | | KLTVL |
| 1260 | DLL3 ANTIBODY | artificial | QVQLVQSGAEVKKPGASVKVSCKASGYTFTNYYMHWVRQAPGLGLEWMGI |
| | CONSTRUCT BINDING | | INPSEGSTSYAQKFQGRVTMTRDTSTNTVYMDLSSLRSEDTAVYYCARGG |
| | DOMAIN | | NSAFYSYYDMDVWGQGTTVTVSSGGGGSGGGGSGGGGSDVVMTQTPLSLP |
| | | | VTLGQPASISCRSSQSLVYRDGNTYLSWFQQRPGQSPRRLIYKVSNWQSG |
| | | | VPDRFSGGGSGTDFTLKISRVEAEDVGVYYCMQGTHWPPTFGQGTKVEIK |
| | | | SGGGGSEVQLVESGGGLVQPGGSLKLSCAASGFTFNKYAMNWVRQAPGKG |
| | | | LEWVARIRSKYNNYATYYADSVKDRFTISRDDSKNTAYLQMNNLKTEDTA |
| | | | VYYCVRHGNFGNSYISYWAYWGQGTLVTVSSGGGGSGGGGSGGGGSQTVV |
| | | | TQEPSLTVSPGGTVTLTCGSSTGAVTSGNYPNWVQQKPGQAPRGLIGGTK |
| | | | FLAPGTPARFSGSLLGGKAALTLSGVQPEDEAEYYCVLWYSNRWVFGGGT |
| | | | KLTVL |
| 1261 | DLL3 ANTIBODY | artificial | QVQLVQSGAEVKKPGASVKVSCKASGYTFTNYYMHWVRQAPGLGLEWMGI |
| | CONSTRUCT BINDING | | INPSDASTSYAQKFQGRVTMTRDTSTNTVYMDLSSLRSEDTAVYYCARGG |
| | DOMAIN | | NSAFYSYYDMDVWGQGTTVTVSSGGGGSGGGGSGGGGSDVVMTQTPLSLP |
| | | | VTLGQPASISCRSSQSLVYRDGNTYLSWFQQRPGQSPRRLIYKVSNWQSG |
| | | | VPDRFSGGGSGTDFTLKISRVEAEDVGVYYCMQGTHWPPTFGQGTKVEIK |
| | | | SGGGGSEVQLVESGGGLVQPGGSLKLSCAASGFTFNKYAMNWVRQAPGKG |
| | | | LEWVARIRSKYNNYATYYADSVKDRFTISRDDSKNTAYLQMNNLKTEDTA |
| | | | VYYCVRHGNFGNSYISYWAYWGQGTLVTVSSGGGGSGGGGSGGGGSQTVV |
| | | | TQEPSLTVSPGGTVTLTCGSSTGAVTSGNYPNWVQQKPGQAPRGLIGGTK |
| | | | FLAPGTPARFSGSLLGGKAALTLSGVQPEDEAEYYCVLWYSNRWVFGGGT |
| | | | KLTVL |
| 1262 | DLL3 ANTIBODY | artificial | QVQLVQSGAEVKKPGASVKVSCKASGYTFTNYYMHWVRQAPGQGLEWMGI |
| | CONSTRUCT BINDING | | INPSDGSTSYAQKFQGRVTMTRDTSTNTVYMDLSSLRSEDTAVYYCARGG |
| | DOMAIN | | NSAFYSYYDMDVWGQGTTVTVSSGGGGSGGGGSGGGGSDVVMTQTPLSLP |
| | | | VTLGQPASISCRSSQSLVYRDGNTYLSWFQQRPGQSPRRLIYKVSNWQSG |
| | | | VPDRFSGSGSGTDFTLKISRVEAEDVGVYYCMQGTHWPPTFGQGTKVEIK |
| | | | SGGGGSEVQLVESGGGLVQPGGSLKLSCAASGFTFNKYAMNWVRQAPGKG |
| | | | LEWVARIRSKYNNYATYYADSVKDRFTISRDDSKNTAYLQMNNLKTEDTA |
| | | | VYYCVRHGNFGNSYISYWAYWGQGTLVTVSSGGGGSGGGGSGGGGSQTVV |
| | | | TQEPSLTVSPGGTVTLTCGSSTGAVTSGNYPNWVQQKPGQAPRGLIGGTK |
| | | | FLAPGTPARFSGSLLGGKAALTLSGVQPEDEAEYYCVLWYSNRWVFGGGT |
| | | | KLTVL |
| 1263 | DLL3 ANTIBODY | artificial | QVQLVQSGAEVKKPGASVKVSCKASGYTFTNYYMHWVRQAPGQGLEWMGI |
| | CONSTRUCT BINDING | | INPSEGSTSYAQKFQGRVTMTRDTSTNTVYMDLSSLRSEDTAVYYCARGG |
| | DOMAIN | | NSAFYSYYDMDVWGQGTTVTVSSGGGGSGGGGSGGGGSDVVMTQTPLSLP |
| | | | VTLGQPASISCRSSQSLVYREGNTYLSWFQQRPGQSPRRLIYKVSNWQSG |
| | | | VPDRFSGSGSGTDFTLKISRVEAEDVGVYYCMQGTHWPPTFGQGTKVEIK |
| | | | SGGGGSEVQLVESGGGLVQPGGSLKLSCAASGFTFNKYAMNWVRQAPGKG |
| | | | LEWVARIRSKYNNYATYYADSVKDRFTISRDDSKNTAYLQMNNLKTEDTA |
| | | | VYYCVRHGNFGNSYISYWAYWGQGTLVTVSSGGGGSGGGGSGGGGSQTVV |
| | | | TQEPSLTVSPGGTVTLTCGSSTGAVTSGNYPNWVQQKPGQAPRGLIGGTK |
| | | | FLAPGTPARFSGSLLGGKAALTLSGVQPEDEAEYYCVLWYSNRWVFGGGT |
| | | | KLTVL |
| 1264 | DLL3 ANTIBODY | artificial | QVQLVQSGAEVKKPGASVKVSCKASGYTFTNYYMHWVRQAPGQGLEWMGI |
| | CONSTRUCT BINDING | | INPSDASTSYAQKFQGRVTMTRDTSTNTVYMDLSSLRSEDTAVYYCARGG |
| | DOMAIN | | NSAFYSYYDMDVWGQGTTVTVSSGGGGSGGGGSGGGGSDVVMTQTPLSLP |
| | | | VTLGQPASISCRSSQSLVYRDANTYLSWFQQRPGQSPRRLIYKVSNWQSG |
| | | | VPDRFSGSGSGTDFTLKISRVEAEDVGVYYCMQGTHWPPTFGQGTKVEIK |
| | | | SGGGGSEVQLVESGGGLVQPGGSLKLSCAASGFTFNKYAMNWVRQAPGKG |
| | | | LEWVARIRSKYNNYATYYADSVKDRFTISRDDSKNTAYLQMNNLKTEDTA |
| | | | VYYCVRHGNFGNSYISYWAYWGQGTLVTVSSGGGGSGGGGSGGGGSQTVV |
| | | | TQEPSLTVSPGGTVTLTCGSSTGAVTSGNYPNWVQQKPGQAPRGLIGGTK |
| | | | FLAPGTPARFSGSLLGGKAALTLSGVQPEDEAEYYCVLWYSNRWVFGGGT |
| | | | KLTVL |
| 1265 | DLL3 ANTIBODY | artificial | QVQLVQSGAEVKKPGASVKVSCKASGYTFTNYYMHWVRQAPGLCLEWMGI |
| | CONSTRUCT BINDING | | INPSDGSTSYAQKFQGRVTMTRDTSTNTVYMDLSSLRSEDTAVYYCARGG |
| | DOMAIN | | NSAFYSYYDMDVWGQGTTVTVSSGGGGSGGGGSGGGGSDVVMTQTPLSLP |
| | | | VTLGQPASISCRSSQSLVYRDGNTYLSWFQQRPGQSPRRLIYKVSNWQSG |
| | | | VPDRFSGGGSGTDFTLKISRVEAEDVGVYYCMQGTHWPPTFGCGTKVEIK |
| | | | SGGGGSEVQLVESGGGLVQPGGSLKLSCAASGFTFNKYAMNWVRQAPGKG |
| | | | LEWVARIRSKYNNYATYYADSVKDRFTISRDDSKNTAYLQMNNLKTEDTA |
| | | | VYYCVRHGNFGNSYISYWAYWGQGTLVTVSSGGGGSGGGGSGGGGSQTVV |
| | | | TQEPSLTVSPGGTVTLTCGSSTGAVTSGNYPNWVQQKPGQAPRGLIGGTK |
| | | | FLAPGTPARFSGSLLGGKAALTLSGVQPEDEAEYYCVLWYSNRWVFGGGT |
| | | | KLTVL |
| 1266 | DLL3 ANTIBODY | artificial | QVQLVQSGAEVKKPGASVKVSCKASGYTFTNYYMHWVRQAPGLCLEWMGI |
| | CONSTRUCT BINDING | | INPSDGSTSYAQKFQGRVTMTRDTSTNTVYMDLSSLRSEDTAVYYCARGG |
| | DOMAIN | | NSAFYSYYDMDVWGQGTTVTVSSGGGGSGGGGSGGGGSDVVMTQTPLSLP |
| | | | VTLGQPASISCRSSQSLVYREGNTYLSWFQQRPGQSPRRLIYKVSNWQSG |
| | | | VPDRFSGGGSGTDFTLKISRVEAEDVGVYYCMQGTHWPPTFGCGTKVEIK |
| | | | SGGGGSEVQLVESGGGLVQPGGSLKLSCAASGFTFNKYAMNWVRQAPGKG |
| | | | LEWVARIRSKYNNYATYYADSVKDRFTISRDDSKNTAYLQMNNLKTEDTA |
| | | | VYYCVRHGNFGNSYISYWAYWGQGTLVTVSSGGGGSGGGGSGGGGSQTVV |
| | | | TQEPSLTVSPGGTVTLTCGSSTGAVTSGNYPNWVQQKPGQAPRGLIGGTK |
| | | | FLAPGTPARFSGSLLGGKAALTLSGVQPEDEAEYYCVLWYSNRWVFGGGT |
| | | | KLTVL |
| 1267 | DLL3 ANTIBODY | artificial | QVQLVQSGAEVKKPGASVKVSCKASGYTFTNYYMHWVRQAPGLCLEWMGI |
| | CONSTRUCT BINDING | | INPSDGSTSYAQKFQGRVTMTRDTSTNTVYMDLSSLRSEDTAVYYCARGG |
| | DOMAIN | | NSAFYSYYDMDVWGQGTTVTVSSGGGGSGGGGSGGGGSDVVMTQTPLSLP |
| | | | VTLGQPASISCRSSQSLVYRDANTYLSWFQQRPGQSPRRLIYKVSNWQSG |
| | | | VPDRFSGGGSGTDFTLKISRVEAEDVGVYYCMQGTHWPPTFGCGTKVEIK |
| | | | SGGGGSEVQLVESGGGLVQPGGSLKLSCAASGFTFNKYAMNWVRQAPGKG |
| | | | LEWVARIRSKYNNYATYYADSVKDRFTISRDDSKNTAYLQMNNLKTEDTA |
| | | | VYYCVRHGNFGNSYISYWAYWGQGTLVTVSSGGGGSGGGGSGGGGSQTVV |
| | | | TQEPSLTVSPGGTVTLTCGSSTGAVTSGNYPNWVQQKPGQAPRGLIGGTK |
| | | | FLAPGTPARFSGSLLGGKAALTLSGVQPEDEAEYYCVLWYSNRWVFGGGT |
| | | | KLTVL |
| 1268 | DLL3 ANTIBODY | artificial | QVQLVQSGAEVKKPGASVKVSCKASGYTFTNYYMHWVRQAPGLCLEWMGI |
| | CONSTRUCT BINDING | | INPSDGSTSYAQKFQGRVTMTRDTSTNTVYMDLSSLRSEDTAVYYCARGG |
| | DOMAIN | | NSAFYSYYDMDVWGQGTTVTVSSGGGGSGGGGSGGGGSDVVMTQTPLSLP |
| | | | VTLGQPASISCRSSQSLVYRDGQTYLSWFQQRPGQSPRRLIYKVSNWQSG |
| | | | VPDRFSGGGSGTDFTLKISRVEAEDVGVYYCMQGTHWPPTFGCGTKVEIK |
| | | | SGGGGSEVQLVESGGGLVQPGGSLKLSCAASGFTFNKYAMNWVRQAPGKG |
| | | | LEWVARIRSKYNNYATYYADSVKDRFTISRDDSKNTAYLQMNNLKTEDTA |
| | | | VYYCVRHGNFGNSYISYWAYWGQGTLVTVSSGGGGSGGGGSGGGGSQTVV |
| | | | TQEPSLTVSPGGTVTLTCGSSTGAVTSGNYPNWVQQKPGQAPRGLIGGTK |
| | | | FLAPGTPARFSGSLLGGKAALTLSGVQPEDEAEYYCVLWYSNRWVFGGGT |
| | | | KLTVL |
| 1269 | DLL3 ANTIBODY | artificial | QVQLVQSGAEVKKPGASVKVSCKASGYTFTNYYMHWVRQAPGLCLEWMGI |
| | CONSTRUCT BINDING | | INPSDGSTSYAQKFQGRVTMTRDTSTNTVYMDLSSLRSEDTAVYYCARGG |
| | DOMAIN | | NSAFYSYYDMDVWGQGTTVTVSSGGGGSGGGGSGGGGSDVVMTQTPLSLP |
| | | | VTLGQPASISCRSSQSLVYRDGNAYLSWFQQRPGQSPRRLIYKVSNWQSG |
| | | | VPDRFSGGGSGTDFTLKISRVEAEDVGVYYCMQGTHWPPTFGCGTKVEIK |
| | | | SGGGGSEVQLVESGGGLVQPGGSLKLSCAASGFTFNKYAMNWVRQAPGKG |
| | | | LEWVARIRSKYNNYATYYADSVKDRFTISRDDSKNTAYLQMNNLKTEDTA |
| | | | VYYCVRHGNFGNSYISYWAYWGQGTLVTVSSGGGGSGGGGSGGGGSQTVV |
| | | | TQEPSLTVSPGGTVTLTCGSSTGAVTSGNYPNWVQQKPGQAPRGLIGGTK |
| | | | FLAPGTPARFSGSLLGGKAALTLSGVQPEDEAEYYCVLWYSNRWVFGGGT |
| | | | KLTVL |
| 1270 | DLL3 ANTIBODY | artificial | QVQLVQSGAEVKKPGASVKVSCKASGYTFTNYYMHWVRQAPGLCLEWMGI |
| | CONSTRUCT BINDING | | INPSDGSTSYAQKFQGRVTMTRDTSTNTVYMDLSSLRSEDTAVYYCARGG |
| | DOMAIN | | NSAFYSYYDMDVWGQGTTVTVSSGGGGSGGGGSGGGGSDVVMTQTPLSLP |
| | | | VTLGQPASISCRSSQSLVYRDGNTYLSWFQQRPGQSPRRLIYKVSNWQSG |
| | | | VPDRFSGSGSGTDFTLKISRVEAEDVGVYYCMQGTHWPPTFGCGTKVEIK |
| | | | SGGGGSEVQLVESGGGLVQPGGSLKLSCAASGFTFNKYAMNWVRQAPGKG |
| | | | LEWVARIRSKYNNYATYYADSVKDRFTISRDDSKNTAYLQMNNLKTEDTA |
| | | | VYYCVRHGNFGNSYISYWAYWGQGTLVTVSSGGGGSGGGGSGGGGSQTVV |
| | | | TQEPSLTVSPGGTVTLTCGSSTGAVTSGNYPNWVQQKPGQAPRGLIGGTK |
| | | | FLAPGTPARFSGSLLGGKAALTLSGVQPEDEAEYYCVLWYSNRWVFGGGT |
| | | | KLTVL |
| 1271 | DLL3 ANTIBODY | artificial | QVQLVQSGAEVKKPGASVKVSCKASGYTFTNYYMHWVRQAPGQCLEWMGI |
| | CONSTRUCT BINDING | | INPSDGSTSYAQKFQGRVTMTRDTSTNTVYMDLSSLRSEDTAVYYCARGG |
| | DOMAIN | | NSAFYSYYDMDVWGQGTTVTVSSGGGGSGGGGSGGGGSDVVMTQTPLSLP |
| | | | VTLGQPASISCRSSQSLVYRDGNTYLSWFQQRPGQSPRRLIYKVSNWQSG |
| | | | VPDRFSGGGSGTDFTLKISRVEAEDVGVYYCMQGTHWPPTFGCGTKVEIK |
| | | | SGGGGSEVQLVESGGGLVQPGGSLKLSCAASGFTFNKYAMNWVRQAPGKG |
| | | | LEWVARIRSKYNNYATYYADSVKDRFTISRDDSKNTAYLQMNNLKTEDTA |
| | | | VYYCVRHGNFGNSYISYWAYWGQGTLVTVSSGGGGSGGGGSGGGGSQTVV |
| | | | TQEPSLTVSPGGTVTLTCGSSTGAVTSGNYPNWVQQKPGQAPRGLIGGTK |
| | | | FLAPGTPARFSGSLLGGKAALTLSGVQPEDEAEYYCVLWYSNRWVFGGGT |
| | | | KLTVL |
| 1272 | DLL3 ANTIBODY | artificial | QVQLVQSGAEVKKPGASVKVSCKASGYTFTNYYMHWVRQAPGLCLEWMGI |
| | CONSTRUCT BINDING | | INPSEGSTSYAQKFQGRVTMTRDTSTNTVYMDLSSLRSEDTAVYYCARGG |
| | DOMAIN | | NSAFYSYYDMDVWGQGTTVTVSSGGGGSGGGGSGGGGSDVVMTQTPLSLP |
| | | | VTLGQPASISCRSSQSLVYRDGNTYLSWFQQRPGQSPRRLIYKVSNWQSG |
| | | | VPDRFSGGGSGTDFTLKISRVEAEDVGVYYCMQGTHWPPTFGCGTKVEIK |
| | | | SGGGGSEVQLVESGGGLVQPGGSLKLSCAASGFTFNKYAMNWVRQAPGKG |
| | | | LEWVARIRSKYNNYATYYADSVKDRFTISRDDSKNTAYLQMNNLKTEDTA |
| | | | VYYCVRHGNFGNSYISYWAYWGQGTLVTVSSGGGGSGGGGSGGGGSQTVV |
| | | | TQEPSLTVSPGGTVTLTCGSSTGAVTSGNYPNWVQQKPGQAPRGLIGGTK |
| | | | FLAPGTPARFSGSLLGGKAALTLSGVQPEDEAEYYCVLWYSNRWVFGGGT |
| | | | KLTVL |
| 1273 | DLL3 ANTIBODY | artificial | QVQLVQSGAEVKKPGASVKVSCKASGYTFTNYYMHWVRQAPGLCLEWMGI |
| | CONSTRUCT BINDING | | INPSDASTSYAQKFQGRVTMTRDTSTNTVYMDLSSLRSEDTAVYYCARGG |
| | DOMAIN | | NSAFYSYYDMDVWGQGTTVTVSSGGGGSGGGGSGGGGSDVVMTQTPLSLP |
| | | | VTLGQPASISCRSSQSLVYRDGNTYLSWFQQRPGQSPRRLIYKVSNWQSG |
| | | | VPDRFSGGGSGTDFTLKISRVEAEDVGVYYCMQGTHWPPTFGCGTKVEIK |
| | | | SGGGGSEVQLVESGGGLVQPGGSLKLSCAASGFTFNKYAMNWVRQAPGKG |
| | | | LEWVARIRSKYNNYATYYADSVKDRFTISRDDSKNTAYLQMNNLKTEDTA |
| | | | VYYCVRHGNFGNSYISYWAYWGQGTLVTVSSGGGGSGGGGSGGGGSQTVV |
| | | | TQEPSLTVSPGGTVTLTCGSSTGAVTSGNYPNWVQQKPGQAPRGLIGGTK |
| | | | FLAPGTPARFSGSLLGGKAALTLSGVQPEDEAEYYCVLWYSNRWVFGGGT |
| | | | KLTVL |
| 1274 | DLL3 ANTIBODY | artificial | QVQLVQSGAEVKKPGASVKVSCKASGYTFTNYYMHWVRQAPGQCLEWMGI |
| | CONSTRUCT BINDING | | INPSDGSTSYAQKFQGRVTMTRDTSTNTVYMDLSSLRSEDTAVYYCARGG |
| | DOMAIN | | NSAFYSYYDMDVWGQGTTVTVSSGGGGSGGGGSGGGGSDVVMTQTPLSLP |
| | | | VTLGQPASISCRSSQSLVYRDGNTYLSWFQQRPGQSPRRLIYKVSNWQSG |
| | | | VPDRFSGSGSGTDFTLKISRVEAEDVGVYYCMQGTHWPPTFGCGTKVEIK |
| | | | SGGGGSEVQLVESGGGLVQPGGSLKLSCAASGFTFNKYAMNWVRQAPGKG |
| | | | LEWVARIRSKYNNYATYYADSVKDRFTISRDDSKNTAYLQMNNLKTEDTA |
| | | | VYYCVRHGNFGNSYISYWAYWGQGTLVTVSSGGGGSGGGGSGGGGSQTVV |
| | | | TQEPSLTVSPGGTVTLTCGSSTGAVTSGNYPNWVQQKPGQAPRGLIGGTK |
| | | | FLAPGTPARFSGSLLGGKAALTLSGVQPEDEAEYYCVLWYSNRWVFGGGT |
| | | | KLTVL |
| 1275 | DLL3 ANTIBODY | artificial | QVQLVQSGAEVKKPGASVKVSCKASGYTFTNYYMHWVRQAPGQCLEWMGI |
| | CONSTRUCT BINDING | | INPSEGSTSYAQKFQGRVTMTRDTSTNTVYMDLSSLRSEDTAVYYCARGG |
| | DOMAIN | | NSAFYSYYDMDVWGQGTTVTVSSGGGGSGGGGSGGGGSDVVMTQTPLSLP |
| | | | VTLGQPASISCRSSQSLVYREGNTYLSWFQQRPGQSPRRLIYKVSNWQSG |
| | | | VPDRFSGSGSGTDFTLKISRVEAEDVGVYYCMQGTHWPPTFGCGTKVEIK |
| | | | SGGGGSEVQLVESGGGLVQPGGSLKLSCAASGFTFNKYAMNWVRQAPGKG |
| | | | LEWVARIRSKYNNYATYYADSVKDRFTISRDDSKNTAYLQMNNLKTEDTA |
| | | | VYYCVRHGNFGNSYISYWAYWGQGTLVTVSSGGGGSGGGGSGGGGSQTVV |
| | | | TQEPSLTVSPGGTVTLTCGSSTGAVTSGNYPNWVQQKPGQAPRGLIGGTK |
| | | | FLAPGTPARFSGSLLGGKAALTLSGVQPEDEAEYYCVLWYSNRWVFGGGT |
| | | | KLTVL |
| 1276 | DLL3 ANTIBODY | artificial | QVQLVQSGAEVKKPGASVKVSCKASGYTFTNYYMHWVRQAPGQCLEWMGI |
| | CONSTRUCT BINDING | | INPSDASTSYAQKFQGRVTMTRDTSTNTVYMDLSSLRSEDTAVYYCARGG |
| | DOMAIN | | NSAFYSYYDMDVWGQGTTVTVSSGGGGSGGGGSGGGGSDVVMTQTPLSLP |
| | | | VTLGQPASISCRSSQSLVYRDANTYLSWFQQRPGQSPRRLIYKVSNWQSG |
| | | | VPDRFSGSGSGTDFTLKISRVEAEDVGVYYCMQGTHWPPTFGCGTKVEIK |
| | | | SGGGGSEVQLVESGGGLVQPGGSLKLSCAASGFTFNKYAMNWVRQAPGKG |
| | | | LEWVARIRSKYNNYATYYADSVKDRFTISRDDSKNTAYLQMNNLKTEDTA |
| | | | VYYCVRHGNFGNSYISYWAYWGQGTLVTVSSGGGGSGGGGSGGGGSQTVV |
| | | | TQEPSLTVSPGGTVTLTCGSSTGAVTSGNYPNWVQQKPGQAPRGLIGGTK |
| | | | FLAPGTPARFSGSLLGGKAALTLSGVQPEDEAEYYCVLWYSNRWVFGGGT |
| | | | KLTVL |
| 1277 | DLL3 ANTIBODY | artificial | QVQLQESGPGLVKPSETLSLTCTVSGGSISSYYWSWIRQPPGKGLEWIGY |
| | CONSTRUCT BINDING | | VYYSGTTNYNPSLKSRVTISVDTSKNQFSLKLSSVTAADTAVYYCASIAV |
| | DOMAIN | | TGFYFDYWGQGTLVTVSSGGGGSGGGGSGGGGSEIVLTQSPGTLSLSPGE |
| | | | RVTLSCRASQRVNNNYLAWYQQRPGQAPRLLIYGASSRATGIPDRFSGSG |
| | | | SGTDFTLTISRLEPEDFAVYYCQQYDRSPLTFGGGTKLEIKSGGGGSEVQ |
| | | | LVESGGGLVQPGGSLKLSCAASGFTFNKYAMNWVRQAPGKGLEWVARIRS |
| | | | KYNNYATYYADSVKDRFTISRDDSKNTAYLQMNNLKTEDTAVYYCVRHGN |
| | | | FGNSYISYWAYWGQGTLVTVSSGGGGSGGGGSGGGGSQTVVTQEPSLTVS |
| | | | PGGTVTLTCGSSTGAVTSGNYPNWVQQKPGQAPRGLIGGTKFLAPGTPAR |
| | | | FSGSLLGGKAALTLSGVQPEDEAEYYCVLWYSNRWVFGGGTKLTVLGGGG |
| | | | DKTHTCPPCPAPELLGGPSVFLFPPKPKDTLMISRTPEVTCVVVDVSHED |
| | | | PEVKFNWYVDGVEVHNAKTKPCEEQYGSTYRCVSVLTVLHQDWLNGKEYK |
| | | | CKVSNKALPAPIEKTISKAKGQPREPQVYTLPPSREEMTKNQVSLTCLVK |
| | | | GFYPSDIAVEWESNGQPENNYKTTPPVLDSDGSFFLYSKLTVDKSRWQQG |
| | | | NVFSCSVMHEALHNHYTQKSLSLSPGKGGGGSGGGGSGGGGSGGGGSGGG |
| | | | GSGGGGSDKTHTCPPCPAPELLGGPSVFLFPPKPKDTLMISRTPEVTCVV |
| | | | VDVSHEDPEVKFNWYVDGVEVHNAKTKPCEEQYGSTYRCVSVLTVLHQDW |
| | | | LNGKEYKCKVSNKALPAPIEKTISKAKGQPREPQVYTLPPSREEMTKNQV |
| | | | SLTCLVKGFYPSDIAVEWESNGQPENNYKTTPPVLDSDGSFFLYSKLTVD |
| | | | KSRWQQGNVFSCSVMHEALHNHYTQKSLSLSPGK |
| 1278 | DLL3 ANTIBODY | artificial | QVQLQESGPGLVKPSETLSLTCTVSGGSISSYYWSWIRQPPGKGLEWIGY |
| | CONSTRUCT BINDING | | VYYSGTTNYNPSLKSRVTISVDTSKNQFSLKLSSVTAADTAVYYCASIAV |
| | DOMAIN | | TGFYFDYWGQGTLVTVSSGGGGSGGGGSGGGGSEIVLTQSPGTLSLSPGE |
| | | | RVTLSCRASQRVNNNYLAWYQQRPGQAPRLLIYGASSRATGIPDRFSGSG |
| | | | SGTDFTLTISRLEPEDFAVYYCQQYDRSPLTFGGGTKLEIKSGGGGSEVQ |
| | | | LVESGGGLVQPGGSLKLSCAASGFTFNKYAMNWVRQAPGKGLEWVARIRS |
| | | | KYNNYATYYADSVKDRFTISRDDSKNTAYLQMNNLKTEDTAVYYCVRHGN |
| | | | FGNSYISYWAYWGQGTLVTVSSGGGGSGGGGSGGGGSQTVVTQEPSLTVS |
| | | | PGGTVTLTCGSSTGAVTSGNYPNWVQQKPGQAPRGLIGGTKFLAPGTPAR |
| | | | FSGSLLGGKAALTLSGVQPEDEAEYYCVLWYSNRWVFGGGTKLTVLGGGG |
| | | | DKTHTCPPCPAPELLGGPSVFLFPPKPKDTLMISRTPEVTCVVVDVSHED |
| | | | PEVKFNWYVDGVEVHNAKTKPCEEQYGSTYRCVSVLTVLHQDWLNGKEYK |
| | | | CKVSNKALPAPIEKTISKAKGQPREPQVYTLPPSREEMTKNQVSLTCLVK |
| | | | GFYPSDIAVEWESNGQPENNYKTTPPVLDSDGSFFLYSKLTVDKSRWQQG |
| | | | NVFSCSVMHEALHNHYTQKSLSLSPGGGGSGGGGSGGGGSGGGGSGGGGS |
| | | | GGGGSDKTHTCPPCPAPELLGGPSVFLFPPKPKDTLMISRTPEVTCVVVD |
| | | | VSHEDPEVKFNWYVDGVEVHNAKTKPCEEQYGSTYRCVSVLTVLHQDWLN |
| | | | GKEYKCKVSNKALPAPIEKTISKAKGQPREPQVYTLPPSREEMTKNQVSL |
| | | | TCLVKGFYPSDIAVEWESNGQPENNYKTTPPVLDSDGSFFLYSKLTVDKS |
| | | | RWQQGNVFSCSVMHEALHNHYTQKSLSLSPGK |
| 1279 | DLL3 ANTIBODY | artificial | QVQLQESGPGLVKPSETLSLTCTVSGGSISSYYWSWIRQPPGKCLEWIGY |
| | CONSTRUCT BINDING | | VYYSGTTNYNPSLKSRVTISVDTSKNQFSLKLSSVTAADTAVYYCASIAV |
| | DOMAIN | | TGFYFDYWGQGTLVTVSSGGGGSGGGGSGGGGSEIVLTQSPGTLSLSPGE |
| | | | RVTLSCRASQRVNNNYLAWYQQRPGQAPRLLIYGASSRATGIPDRFSGSG |
| | | | SGTDFTLTISRLEPEDFAVYYCQQYDRSPLTFGCGTKLEIKSGGGGSEVQ |
| | | | LVESGGGLVQPGGSLKLSCAASGFTFNKYAMNWVRQAPGKGLEWVARIRS |
| | | | KYNNYATYYADSVKDRFTISRDDSKNTAYLQMNNLKTEDTAVYYCVRHGN |
| | | | FGNSYISYWAYWGQGTLVTVSSGGGGSGGGGSGGGGSQTVVTQEPSLTVS |
| | | | PGGTVTLTCGSSTGAVTSGNYPNWVQQKPGQAPRGLIGGTKFLAPGTPAR |
| | | | FSGSLLGGKAALTLSGVQPEDEAEYYCVLWYSNRWVFGGGTKLTVLGGGG |
| | | | DKTHTCPPCPAPELLGGPSVFLFPPKPKDTLMISRTPEVTCVVVDVSHED |
| | | | PEVKFNWYVDGVEVHNAKTKPCEEQYGSTYRCVSVLTVLHQDWLNGKEYK |
| | | | CKVSNKALPAPIEKTISKAKGQPREPQVYTLPPSREEMTKNQVSLTCLVK |
| | | | GFYPSDIAVEWESNGQPENNYKTTPPVLDSDGSFFLYSKLTVDKSRWQQG |
| | | | NVFSCSVMHEALHNHYTQKSLSLSPGKGGGGSGGGGSGGGGSGGGGSGGG |
| | | | GSGGGGSDKTHTCPPCPAPELLGGPSVFLFPPKPKDTLMISRTPEVTCVV |
| | | | VDVSHEDPEVKFNWYVDGVEVHNAKTKPCEEQYGSTYRCVSVLTVLHQDW |
| | | | LNGKEYKCKVSNKALPAPIEKTISKAKGQPREPQVYTLPPSREEMTKNQV |
| | | | SLTCLVKGFYPSDIAVEWESNGQPENNYKTTPPVLDSDGSFFLYSKLTVD |
| | | | KSRWQQGNVFSCSVMHEALHNHYTQKSLSLSPGK |
| 1280 | DLL3 ANTIBODY | artificial | QVQLQESGPGLVKPSETLSLTCTVSGGSISSYYWSWIRQPPGKCLEWIGY |
| | CONSTRUCT BINDING | | VYYSGTTNYNPSLKSRVTISVDTSKNQFSLKLSSVTAADTAVYYCASIAV |
| | DOMAIN | | TGFYFDYWGQGTLVTVSSGGGGSGGGGSGGGGSEIVLTQSPGTLSLSPGE |
| | | | RVTLSCRASQRVNNNYLAWYQQRPGQAPRLLIYGASSRATGIPDRFSGSG |
| | | | SGTDFTLTISRLEPEDFAVYYCQQYDRSPLTFGCGTKLEIKSGGGGSEVQ |
| | | | LVESGGGLVQPGGSLKLSCAASGFTFNKYAMNWVRQAPGKGLEWVARIRS |
| | | | KYNNYATYYADSVKDRFTISRDDSKNTAYLQMNNLKTEDTAVYYCVRHGN |
| | | | FGNSYISYWAYWGQGTLVTVSSGGGGSGGGGSGGGGSQTVVTQEPSLTVS |
| | | | PGGTVTLTCGSSTGAVTSGNYPNWVQQKPGQAPRGLIGGTKFLAPGTPAR |
| | | | FSGSLLGGKAALTLSGVQPEDEAEYYCVLWYSNRWVFGGGTKLTVLGGGG |
| | | | DKTHTCPPCPAPELLGGPSVFLFPPKPKDTLMISRTPEVTCVVVDVSHED |
| | | | PEVKFNWYVDGVEVHNAKTKPCEEQYGSTYRCVSVLTVLHQDWLNGKEYK |
| | | | CKVSNKALPAPIEKTISKAKGQPREPQVYTLPPSREEMTKNQVSLTCLVK |
| | | | GFYPSDIAVEWESNGQPENNYKTTPPVLDSDGSFFLYSKLTVDKSRWQQG |
| | | | NVFSCSVMHEALHNHYTQKSLSLSPGGGGSGGGGSGGGGSGGGGSGGGGS |
| | | | GGGGSDKTHTCPPCPAPELLGGPSVFLFPPKPKDTLMISRTPEVTCVVVD |
| | | | VSHEDPEVKFNWYVDGVEVHNAKTKPCEEQYGSTYRCVSVLTVLHQDWLN |
| | | | GKEYKCKVSNKALPAPIEKTISKAKGQPREPQVYTLPPSREEMTKNQVSL |
| | | | TCLVKGFYPSDIAVEWESNGQPENNYKTTPPVLDSDGSFFLYSKLTVDKS |
| | | | RWQQGNVFSCSVMHEALHNHYTQKSLSLSPGK |
| 1281 | DLL3 ANTIBODY | artificial | QVQLQESGPGLVKPSETLSLTCTVSGASISSFYWSWIRQPPGKGLEWIGY |
| | CONSTRUCT BINDING | | IYYSGTTNYNPSLKSRVTISVDTSKNQFSLKLSSVTAADTAVYYCARIAV |
| | DOMAIN | | AGFFFDYWGQGTLVTVSSGGGGSGGGGSGGGGSEIVLTQSPGTLSLSPGE |
| | | | RATLSCRASQSVNKNYLAWYQQKPGQAPRLLIYGASSRATGIPDRFSGSG |
| | | | SGTDFTLTISRLEPEDFAVYYCQQYDRSPLTFGGGTKVEIKSGGGGSEVQ |
| | | | LVESGGGLVQPGGSLKLSCAASGFTFNKYAMNWVRQAPGKGLEWVARIRS |
| | | | KYNNYATYYADSVKDRFTISRDDSKNTAYLQMNNLKTEDTAVYYCVRHGN |
| | | | FGNSYISYWAYWGQGTLVTVSSGGGGSGGGGSGGGGSQTVVTQEPSLTVS |
| | | | PGGTVTLTCGSSTGAVTSGNYPNWVQQKPGQAPRGLIGGTKFLAPGTPAR |
| | | | FSGSLLGGKAALTLSGVQPEDEAEYYCVLWYSNRWVFGGGTKLTVLGGGG |
| | | | DKTHTCPPCPAPELLGGPSVFLFPPKPKDTLMISRTPEVTCVVVDVSHED |
| | | | PEVKFNWYVDGVEVHNAKTKPCEEQYGSTYRCVSVLTVLHQDWLNGKEYK |
| | | | CKVSNKALPAPIEKTISKAKGQPREPQVYTLPPSREEMTKNQVSLTCLVK |
| | | | GFYPSDIAVEWESNGQPENNYKTTPPVLDSDGSFFLYSKLTVDKSRWQQG |
| | | | NVFSCSVMHEALHNHYTQKSLSLSPGKGGGGSGGGGSGGGGSGGGGSGGG |
| | | | GSGGGGSDKTHTCPPCPAPELLGGPSVFLFPPKPKDTLMISRTPEVTCVV |
| | | | VDVSHEDPEVKFNWYVDGVEVHNAKTKPCEEQYGSTYRCVSVLTVLHQDW |
| | | | LNGKEYKCKVSNKALPAPIEKTISKAKGQPREPQVYTLPPSREEMTKNQV |
| | | | SLTCLVKGFYPSDIAVEWESNGQPENNYKTTPPVLDSDGSFFLYSKLTVD |
| | | | KSRWQQGNVFSCSVMHEALHNHYTQKSLSLSPGK |
| 1282 | DLL3 ANTIBODY | artificial | QVQLQESGPGLVKPSETLSLTCTVSGASISSFYWSWIRQPPGKGLEWIGY |
| | CONSTRUCT BINDING | | IYYSGTTNYNPSLKSRVTISVDTSKNQFSLKLSSVTAADTAVYYCARIAV |
| | DOMAIN | | AGFFFDYWGQGTLVTVSSGGGGSGGGGSGGGGSEIVLTQSPGTLSLSPGE |
| | | | RATLSCRASQSVNKNYLAWYQQKPGQAPRLLIYGASSRATGIPDRFSGSG |
| | | | SGTDFTLTISRLEPEDFAVYYCQQYDRSPLTFGGGTKVEIKSGGGGSEVQ |
| | | | LVESGGGLVQPGGSLKLSCAASGFTFNKYAMNWVRQAPGKGLEWVARIRS |
| | | | KYNNYATYYADSVKDRFTISRDDSKNTAYLQMNNLKTEDTAVYYCVRHGN |
| | | | FGNSYISYWAYWGQGTLVTVSSGGGGSGGGGSGGGGSQTVVTQEPSLTVS |
| | | | PGGTVTLTCGSSTGAVTSGNYPNWVQQKPGQAPRGLIGGTKFLAPGTPAR |
| | | | FSGSLLGGKAALTLSGVQPEDEAEYYCVLWYSNRWVFGGGTKLTVLGGGG |
| | | | DKTHTCPPCPAPELLGGPSVFLFPPKPKDTLMISRTPEVTCVVVDVSHED |
| | | | PEVKFNWYVDGVEVHNAKTKPCEEQYGSTYRCVSVLTVLHQDWLNGKEYK |
| | | | CKVSNKALPAPIEKTISKAKGQPREPQVYTLPPSREEMTKNQVSLTCLVK |
| | | | GFYPSDIAVEWESNGQPENNYKTTPPVLDSDGSFFLYSKLTVDKSRWQQG |
| | | | NVFSCSVMHEALHNHYTQKSLSLSPGGGGSGGGGSGGGGSGGGGSGGGGS |
| | | | GGGGSDKTHTCPPCPAPELLGGPSVFLFPPKPKDTLMISRTPEVTCVVVD |
| | | | VSHEDPEVKFNWYVDGVEVHNAKTKPCEEQYGSTYRCVSVLTVLHQDWLN |
| | | | GKEYKCKVSNKALPAPIEKTISKAKGQPREPQVYTLPPSREEMTKNQVSL |
| | | | TCLVKGFYPSDIAVEWESNGQPENNYKTTPPVLDSDGSFFLYSKLTVDKS |
| | | | RWQQGNVFSCSVMHEALHNHYTQKSLSLSPGK |
| 1283 | DLL3 ANTIBODY | artificial | QVQLQESGPGLVKPSETLSLTCTVSGASISSFYWSWIRQPPGKCLEWIGY |
| | CONSTRUCT BINDING | | IYYSGTTNYNPSLKSRVTISVDTSKNQFSLKLSSVTAADTAVYYCARIAV |
| | DOMAIN | | AGFFFDYWGQGTLVTVSSGGGGSGGGGSGGGGSEIVLTQSPGTLSLSPGE |
| | | | RATLSCRASQSVNKNYLAWYQQKPGQAPRLLIYGASSRATGIPDRFSGSG |
| | | | SGTDFTLTISRLEPEDFAVYYCQQYDRSPLTFGCGTKVEIKSGGGGSEVQ |
| | | | LVESGGGLVQPGGSLKLSCAASGFTFNKYAMNWVRQAPGKGLEWVARIRS |
| | | | KYNNYATYYADSVKDRFTISRDDSKNTAYLQMNNLKTEDTAVYYCVRHGN |
| | | | FGNSYISYWAYWGQGTLVTVSSGGGGSGGGGSGGGGSQTVVTQEPSLTVS |
| | | | PGGTVTLTCGSSTGAVTSGNYPNWVQQKPGQAPRGLIGGTKFLAPGTPAR |
| | | | FSGSLLGGKAALTLSGVQPEDEAEYYCVLWYSNRWVFGGGTKLTVLGGGG |
| | | | DKTHTCPPCPAPELLGGPSVFLFPPKPKDTLMISRTPEVTCVVVDVSHED |
| | | | PEVKFNWYVDGVEVHNAKTKPCEEQYGSTYRCVSVLTVLHQDWLNGKEYK |
| | | | CKVSNKALPAPIEKTISKAKGQPREPQVYTLPPSREEMTKNQVSLTCLVK |
| | | | GFYPSDIAVEWESNGQPENNYKTTPPVLDSDGSFFLYSKLTVDKSRWQQG |
| | | | NVFSCSVMHEALHNHYTQKSLSLSPGKGGGGSGGGGSGGGGSGGGGSGGG |
| | | | GSGGGGSDKTHTCPPCPAPELLGGPSVFLFPPKPKDTLMISRTPEVTCVV |
| | | | VDVSHEDPEVKFNWYVDGVEVHNAKTKPCEEQYGSTYRCVSVLTVLHQDW |
| | | | LNGKEYKCKVSNKALPAPIEKTISKAKGQPREPQVYTLPPSREEMTKNQV |
| | | | SLTCLVKGFYPSDIAVEWESNGQPENNYKTTPPVLDSDGSFFLYSKLTVD |
| | | | KSRWQQGNVFSCSVMHEALHNHYTQKSLSLSPGK |
| 1284 | DLL3 ANTIBODY | artificial | QVQLQESGPGLVKPSETLSLTCTVSGASISSFYWSWIRQPPGKCLEWIGY |
| | CONSTRUCT BINDING | | IYYSGTTNYNPSLKSRVTISVDTSKNQFSLKLSSVTAADTAVYYCARIAV |
| | DOMAIN | | AGFFFDYWGQGTLVTVSSGGGGSGGGGSGGGGSEIVLTQSPGTLSLSPGE |
| | | | RATLSCRASQSVNKNYLAWYQQKPGQAPRLLIYGASSRATGIPDRFSGSG |
| | | | SGTDFTLTISRLEPEDFAVYYCQQYDRSPLTFGCGTKVEIKSGGGGSEVQ |
| | | | LVESGGGLVQPGGSLKLSCAASGFTFNKYAMNWVRQAPGKGLEWVARIRS |
| | | | KYNNYATYYADSVKDRFTISRDDSKNTAYLQMNNLKTEDTAVYYCVRHGN |
| | | | FGNSYISYWAYWGQGTLVTVSSGGGGSGGGGSGGGGSQTVVTQEPSLTVS |
| | | | PGGTVTLTCGSSTGAVTSGNYPNWVQQKPGQAPRGLIGGTKFLAPGTPAR |
| | | | FSGSLLGGKAALTLSGVQPEDEAEYYCVLWYSNRWVFGGGTKLTVLGGGG |
| | | | DKTHTCPPCPAPELLGGPSVFLFPPKPKDTLMISRTPEVTCVVVDVSHED |
| | | | PEVKFNWYVDGVEVHNAKTKPCEEQYGSTYRCVSVLTVLHQDWLNGKEYK |
| | | | CKVSNKALPAPIEKTISKAKGQPREPQVYTLPPSREEMTKNQVSLTCLVK |
| | | | GFYPSDIAVEWESNGQPENNYKTTPPVLDSDGSFFLYSKLTVDKSRWQQG |
| | | | NVFSCSVMHEALHNHYTQKSLSLSPGGGGSGGGGSGGGGSGGGGSGGGGS |
| | | | GGGGSDKTHTCPPCPAPELLGGPSVFLFPPKPKDTLMISRTPEVTCVVVD |
| | | | VSHEDPEVKFNWYVDGVEVHNAKTKPCEEQYGSTYRCVSVLTVLHQDWLN |
| | | | GKEYKCKVSNKALPAPIEKTISKAKGQPREPQVYTLPPSREEMTKNQVSL |
| | | | TCLVKGFYPSDIAVEWESNGQPENNYKTTPPVLDSDGSFFLYSKLTVDKS |
| | | | RWQQGNVFSCSVMHEALHNHYTQKSLSLSPGK |
| 1285 | BCMA ANTIBODY | artificial | GYYMH |
| | CONSTRUCT HCDR1 | | |
| 1286 | BCMA ANTIBODY | artificial | WINPNSGGTKYAQKFQG |
| | CONSTRUCT HCDR2 | | |
| 1287 | BCMA ANTIBODY | artificial | DRITVAGTYYYYGMDV |
| | CONSTRUCT HCDR3 | | |
| 1288 | BCMA ANTIBODY | artificial | RASQGVNNWLA |
| | CONSTRUCT LCDR1 | | |
| 1289 | BCMA ANTIBODY | artificial | TASSLQS |
| | CONSTRUCT LCDR2 | | |
| 1290 | BCMA ANTIBODY | artificial | QQANSFPIT |
| | CONSTRUCT LCDR3 | | |
| 1291 | BCMA ANTIBODY | artificial | QVQLVQSGAEVKKPGASVKVSCKASGYTFTGYYMHWVRQAPGQCLEWMGW |
| | CONSTRUCT VH REGION | | INPNSGGTKYAQKFQGRVTMTRDTSISTAYMELSRLRSDDTAVYYCARDR |
| | | | ITVAGTYYYYGMDVWGQGTTVTVSS |
| 1292 | BCMA ANTIBODY | artificial | DIQMTQSPSSVSASVGDRVTITCRASQGVNNWLAWYQQKPGKAPKLLIYT |
| | CONSTRUCT VL REGION | | ASSLQSGVPSRFSGSGSGTDFTLTIRSLQPEDFATYYCQQANSFPITFGC |
| | | | GTRLEIK |
| 1293 | BCMA ANTIBODY | artificial | QVQLVQSGAEVKKPGASVKVSCKASGYTFTNHIIHWVRQAPGQCLEWMGY |
| | CONSTRUCT BINDING | | INPYPGYHAYNEKFQGRATMTSDTSTSTVYMELSSLRSEDTAVYYCARDG |
| | DOMAIN | | YYRDTDVLDYWGQGTLVTVSSGGGGSGGGGSGGGGSDIQMTQSPSSLSAS |
| | | | VGDRVTITCQASQDISNYLNWYQQKPGKAPKLLIYYTSRLHTGVPSRFSG |
| | | | SGSGTDFTFTISSLEPEDIATYYCQQGNTLPWTFGCGTKVEIKSGGGGSE |
| | | | VQLVESGGGLVQPGGSLKLSCAASGFTFNKYAMNWVRQAPGKGLEWVARI |
| | | | RSKYNNYATYYADSVKDRFTISRDDSKNTAYLQMNNLKTEDTAVYYCVRH |
| | | | GNFGNSYISYWAYWGQGTLVTVSSGGGGSGGGGSGGGGSQTVVTQEPSLT |
| | | | VSPGGTVTLTCGSSTGAVTSGNYPNWVQQKPGQAPRGLIGGTKFLAPGTP |
| | | | ARFSGSLLGGKAALTLSGVQPEDEAEYYCVLWYSNRWVFGGGTKLTVLGG |
| | | | GGDKTHTCPPCPAPELLGGPSVFLFPPKPKDTLMISRTPEVTCVVVDVSH |
| | | | EDPEVKFNWYVDGVEVHNAKTKPCEEQYGSTYRCVSVLTVLHQDWLNGKE |
| | | | YKCKVSNKALPAPIEKTISKAKGQPREPQVYTLPPSREEMTKNQVSLTCL |
| | | | VKGFYPSDIAVEWESNGQPENNYKTTPPVLDSDGSFFLYSKLTVDKSRWQ |
| | | | QGNVFSCSVMHEALHNHYTQKSLSLSPGKGGGGSGGGGSGGGGSGGGGSG |
| | | | GGGSGGGGSDKTHTCPPCPAPELLGGPSVFLFPPKPKDTLMISRTPEVTC |
| | | | VVVDVSHEDPEVKFNWYVDGVEVHNAKTKPCEEQYGSTYRCVSVLTVLHQ |
| | | | DWLNGKEYKCKVSNKALPAPIEKTISKAKGQPREPQVYTLPPSREEMTKN |
| | | | QVSLTCLVKGFYPSDIAVEWESNGQPENNYKTTPPVLDSDGSFFLYSKLT |
| | | | VDKSRWQQGNVFSCSVMHEALHNHYTQKSLSLSPGK |
| 1294 | CLAUDIN 18.2 | artificial | QVQLVQSGAEVKKPGASVKVSCKASGYTFTGYYMHWVRQAPGQCLEWMGW |
| | ANTIBODY CONSTRUCT | | INPNSGGTKYAQKFQGRVTMTRDTSISTAYMELSRLRSDDTAVYYCARDR |
| | BINDING DOMAIN | | ITVAGTYYYYGMDVWGQGTTVTVSSGGGGSGGGGSGGGGSDIQMTQSPSS |
| | | | VSASVGDRVTITCRASQGVNNWLAWYQQKPGKAPKLLIYTASSLQSGVPS |
| | | | RFSGSGSGTDFTLTIRSLQPEDFATYYCQQANSFPITFGCGTRLEIKSGG |
| | | | GGSEVQLVESGGGLVQPGGSLKLSCAASGFTFNKYAMNWVRQAPGKGLEW |
| | | | VARIRSKYNNYATYYADSVKDRFTISRDDSKNTAYLQMNNLKTEDTAVYY |
| | | | CVRHGNFGNSYISYWAYWGQGTLVTVSSGGGGSGGGGSGGGGSQTVVTQE |
| | | | PSLTVSPGGTVTLTCGSSTGAVTSGNYPNWVQQKPGQAPRGLIGGTKFLA |
| | | | PGTPARFSGSLLGGKAALTLSGVQPEDEAEYYCVLWYSNRWVFGGGTKLT |
| | | | VLGGGGDKTHTCPPCPAPELLGGPSVFLFPPKPKDTLMISRTPEVTCVVV |
| | | | DVSHEDPEVKFNWYVDGVEVHNAKTKPCEEQYGSTYRCVSVLTVLHQDWL |
| | | | NGKEYKCKVSNKALPAPIEKTISKAKGQPREPQVYTLPPSREEMTKNQVS |
| | | | LTCLVKGFYPSDIAVEWESNGQPENNYKTTPPVLDSDGSFFLYSKLTVDK |
| | | | SRWQQGNVFSCSVMHEALHNHYTQKSLSLSPGKGGGGSGGGGSGGGGSGG |
| | | | GGSGGGGSGGGGSDKTHTCPPCPAPELLGGPSVFLFPPKPKDTLMISRTP |
| | | | EVTCVVVDVSHEDPEVKFNWYVDGVEVHNAKTKPCEEQYGSTYRCVSVLT |
| | | | VLHQDWLNGKEYKCKVSNKALPAPIEKTISKAKGQPREPQVYTLPPSREE |
| | | | MTKNQVSLTCLVKGFYPSDIAVEWESNGQPENNYKTTPPVLDSDGSFFLY |
| | | | SKLTVDKSRWQQGNVFSCSVMHEALHNHYTQKSLSLSPGK |
| 1295 | MUCIN 17 ANTIBODY | artificial | QVQLQQWGAGLLKPSETLSLTCAVYGGSFSGYYWSWIRQPPGKCLEWIGD |
| | CONSTRUCT BINDING | | IDASGSTKYNPSLKSRVTISLDTSKNQFSLKLNSVTAADTAVYFCARKKY |
| | DOMAIN | | STVWSYFDNWGQGTLVTVSSGGGGSGGGGSGGGGSSYELTQPSSVSVPPG |
| | | | QTASITCSGDKLGDKYASWYQQKPGQSPVLVIYQDRKRPSGVPERFSGSN |
| | | | SGNTATLTISGTQAMDEADYYCQAWGSSTAVFGCGTKLTVLSGGGGSEVQ |
| | | | LVESGGGLVQPGGSLKLSCAASGFTFNKYAMNWVRQAPGKGLEWVARIRS |
| | | | KYNNYATYYADSVKDRFTISRDDSKNTAYLQMNNLKTEDTAVYYCVRHGN |
| | | | FGNSYISYWAYWGQGTLVTVSSGGGGSGGGGSGGGGSQTVVTQEPSLTVS |
| | | | PGGTVTLTCGSSTGAVTSGNYPNWVQQKPGQAPRGLIGGTKFLAPGTPAR |
| | | | FSGSLLGGKAALTLSGVQPEDEAEYYCVLWYSNRWVFGGGTKLTVLGGGG |
| | | | DKTHTCPPCPAPELLGGPSVFLFPPKPKDTLMISRTPEVTCVVVDVSHED |
| | | | PEVKFNWYVDGVEVHNAKTKPCEEQYGSTYRCVSVLTVLHQDWLNGKEYK |
| | | | CKVSNKALPAPIEKTISKAKGQPREPQVYTLPPSREEMTKNQVSLTCLVK |
| | | | GFYPSDIAVEWESNGQPENNYKTTPPVLDSDGSFFLYSKLTVDKSRWQQG |
| | | | NVFSCSVMHEALHNHYTQKSLSLSPGKGGGGSGGGGSGGGGSGGGGSGGG |
| | | | GSGGGGSDKTHTCPPCPAPELLGGPSVFLFPPKPKDTLMISRTPEVTCVV |
| | | | VDVSHEDPEVKFNWYVDGVEVHNAKTKPCEEQYGSTYRCVSVLTVLHQDW |
| | | | LNGKEYKCKVSNKALPAPIEKTISKAKGQPREPQVYTLPPSREEMTKNQV |
| | | | SLTCLVKGFYPSDIAVEWESNGQPENNYKTTPPVLDSDGSFFLYSKLTVD |
| | | | KSRWQQGNVFSCSVMHEALHNHYTQKSLSLSPGK |

1. A method for the treatment of a disease, particularly cancer and/or for the prophylaxis, prevention, reduction, amelioration, and/or alleviation of adverse events associated with cancer immunotherapy, particularly with cancer immunotherapy engaging T cells via CD3 binding antibody constructs in a human patient, said method comprising
(a) administering an antibody construct that binds selectively to a target antigen on a cancer cell and to human CD3 on the surface of a T cell,
(b) administering an inhibitor/antagonist of TNF/TNFR reducing TNF/TNFR signaling, and/or administering an inhibitor/antagonist of IL6/IL6R that reduces IL6/IL6R signaling,
wherein a first dose of said inhibitor/antagonist of TNF/TNFR that reduces TNF/TNFR signaling and/or a first dose of said inhibitor/antagonist of IL6/IL6R that reduces IL6/IL6R according to (b) signaling is administered before administration of a first dose of said antibody construct (a) within a first period, said period ranging from 5 minutes to 7 days prior to administration of the antibody construct, particularly wherein said period is ranging from 15 minutes to 7 days prior to administration of the antibody construct.

2. The method of claim 1, wherein the antibody construct binds selectively to a target antigen on a target cell selected from the group comprising CD19, CD33, FLT3, PSMA, BCMA, Claudin 6, Claudin 18.2, Mucin 17, and DLL3.

3. The method of any one of claims 1 and 2, wherein said method comprises the prevention, prophylaxis, amelioration, reduction and/or alleviation of adverse events associated with cancer immunotherapy, particularly wherein these adverse events are selected from cytokine release syndrome (CRS) and tumor lysis syndrome (TLS), particularly in a patient at risk of developing CRS and/or TLS.

4. The method of any one of claims 1 to 3, wherein at least one further dose, particularly a second dose of said inhibitor/antagonist of TNF/TNFR that reduces TNF/TNFR signaling and/or said inhibitor/antagonist of IL6/IL6R that reduces IL6/IL6R signaling according to (b) is administered before administration of said antibody construct.

5. The method of any one of claims 1 to 4, wherein at least one further dose of said inhibitor/antagonist of TNF/TNFR that reduces TNF/TNFR signaling and/or said inhibitor/antagonist of IL6/IL6R that reduces IL6/IL6R signaling (b) is administered following administration of said antibody construct.

6. The method of any one of claims 1 to 5,
wherein a first dose, and optionally also at least one further dose, of said inhibitor/antagonist of TNF/TNFR that reduces TNF/TNFR signaling and/or said inhibitor/antagonist of IL6/IL6R that reduces IL6/IL6R signaling according to (b) is/are administered within a first period before administration of said antibody construct, and optionally
wherein at least one further dose of said inhibitor/antagonist of TNF/TNFR that reduces TNF/TNFR signaling and/or said inhibitor/antagonist of IL6/IL6R that reduces IL6/IL6R signaling according to (b) is administered within a second period before administration of said antibody construct, and optionally
wherein at least one dose of said inhibitor/antagonist of TNF/TNFR that reduces TNF/TNFR signaling and/or said inhibitor/antagonist of IL6/IL6R that reduces IL6/IL6R signaling according to (b) is administered within a third period following administration of said antibody construct.

7. The method of any one of claims 1 to 6, wherein said first dose, and optionally also at least one further dose of said inhibitor of TNF/TNFR that reduces TNF/TNFR signaling and/or said inhibitor/antagonist of IL6/IL6R that reduces IL6/IL6R signaling according to (b) is/are administered before administration of said antibody construct, and wherein the at least one further dose of said inhibitor/antagonist of TNF/TNFR that reduces TNF/TNFR signaling and/or said inhibitor/antagonist of IL6/IL6R that reduces IL6/IL6R signaling according to (b) is administered following administration of said antibody construct,
wherein the first dose of said inhibitor/antagonist of TNF/TNFR that reduces TNF/TNFR signaling and/or said inhibitor/antagonist of IL6/IL6R that reduces IL6/IL6R signaling according to (b) is administered within a first period before administration of the antibody construct, said period ranging from 30 minutes to 7 days prior to administration of the antibody construct,
wherein also said at least one further dose of said inhibitor/antagonist of TNF/TNFR that reduces TNF/TNFR signaling and/or said inhibitor/antagonist of IL6/IL6R that reduces IL6/IL6R signaling according to (b) is administered within a second period before administration of the antibody construct, and optionally
wherein said at least one other dose of said inhibitor/antagonist of TNF/TNFR that reduces TNF/TNFR signaling and/or said inhibitor/antagonist of IL6/IL6R that reduces IL6/IL6R signaling according to (b) is administered within a third period following administration of said antibody construct.

8. The method of any one of claims 1 to 7, wherein said first dose, and optionally also at least one further dose of said inhibitor of TNF/TNFR that reduces TNF/TNFR signaling and/or said inhibitor/antagonist of IL6/IL6R that reduces IL6/IL6R signaling according to (b) is/are administered before administration of said antibody construct, and wherein the at least one further dose of said inhibitor/antagonist of TNF/TNFR that reduces TNF/TNFR signaling and/or said inhibitor/antagonist of IL6/IL6R that reduces IL6/IL6R signaling according to (b) is administered following administration of said antibody construct,
wherein the first dose of said inhibitor/antagonist of TNF/TNFR that reduces TNF/TNFR signaling and/or said inhibitor/antagonist of IL6/IL6R that reduces IL6/IL6R signaling according to (b) is administered within a first period before administration of the antibody construct, said period ranging from 30 minutes to 6 days prior to administration of the antibody construct,
wherein also said at least one further dose of said inhibitor/antagonist of TNF/TNFR that reduces TNF/TNFR signaling and/or said inhibitor/antagonist of IL6/IL6R that reduces IL6/IL6R signaling according to (b) is administered within a second period before administration of the antibody construct, and optionally
wherein said at least one other dose of said inhibitor/antagonist of TNF/TNFR that reduces TNF/TNFR signaling and/or said inhibitor/antagonist of IL6/IL6R that reduces IL6/IL6R signaling according to (b) is administered within a third period following administration of said antibody construct.

9. The method of any one of claims 1 to 8, wherein said first dose, and optionally also at least one further dose of said inhibitor of TNF/TNFR that reduces TNF/TNFR signaling and/or said inhibitor/antagonist of IL6/IL6R that reduces IL6/IL6R signaling according to (b) is/are administered before administration of said antibody construct, and wherein the at least one further dose of said inhibitor/antagonist of TNF/TNFR that reduces TNF/TNFR signaling and/or said inhibitor/antagonist of IL6/IL6R that reduces IL6/IL6R signaling according to (b) is administered following administration of said antibody construct,
wherein the first dose of said inhibitor/antagonist of TNF/TNFR that reduces TNF/TNFR signaling and/or said inhibitor/antagonist of IL6/IL6R that reduces IL6/IL6R signaling according to (b) is administered within a first period before administration of the antibody construct, said period ranging from 30 minutes to 5 days prior to administration of the antibody construct,
wherein also said at least one further dose of said inhibitor/antagonist of TNF/TNFR that reduces TNF/TNFR signaling and/or said inhibitor/antagonist of IL6/IL6R that reduces IL6/IL6R signaling according to (b) is administered within a second period before administration of the antibody construct, and optionally
wherein said at least one other dose of said inhibitor/antagonist of TNF/TNFR that reduces TNF/TNFR signaling and/or said inhibitor/antagonist of IL6/IL6R that reduces IL6/IL6R signaling according to (b) is administered within a third period following administration of said antibody construct.

10. The method of any one of claims 1 to 9, wherein said first dose, and optionally also at least one further dose of said inhibitor/antagonist of TNF/TNFR that reduces TNF/TNFR signaling and/or said inhibitor/antagonist of IL6/IL6R that reduces IL6/IL6R signaling according to (b) is/are administered before administration of said antibody construct, and wherein the at least one further dose of said inhibitor/antagonist of TNF/TNFR that reduces TNF/TNFR signaling and/or said inhibitor/antagonist of IL6/IL6R that reduces IL6/IL6R signaling according to (b) is administered following administration of said antibody construct,
wherein the first dose of said inhibitor/antagonist of TNF/TNFR that reduces TNF/TNFR signaling and/or said inhibitor/antagonist of IL6/IL6R that reduces IL6/IL6R signaling according to (b) is administered within a first period before administration of the antibody construct, said period ranging from 30 minutes to 4 days prior to administration of the antibody construct,
wherein also said at least one optional further dose of said inhibitor/antagonist of TNF/TNFR that reduces TNF/TNFR signaling and/or said inhibitor/antagonist of IL6/IL6R that reduces IL6/IL6R signaling according to (b) is administered within a second period before administration of the antibody construct, and optionally
wherein said at least one other dose of said inhibitor/antagonist of TNF/TNFR that reduces TNF/TNFR signaling and/or said inhibitor/antagonist of IL6/IL6R that reduces IL6/IL6R signaling according to (b) is administered within a third period following administration of said antibody construct.

11. The method of any one of claims 1 to 10, wherein said first dose, and optionally also at least one further dose of said inhibitor/antagonist of TNF/TNFR that reduces TNF/TNFR signaling and/or said inhibitor/antagonist of IL6/IL6R that reduces IL6/IL6R signaling according to (b) is/are administered before administration of said antibody construct, and wherein the at least one further dose of said inhibitor/antagonist of TNF/TNFR that reduces TNF/TNFR signaling and/or said inhibitor/antagonist of IL6/IL6R that reduces IL6/IL6R signaling according to (b) is administered following administration of said antibody construct,
wherein the first dose of said inhibitor/antagonist of TNF/TNFR that reduces TNF/TNFR signaling and/or said inhibitor/antagonist of IL6/IL6R that reduces IL6/IL6R signaling according to (b) is administered within a first period before administration of the antibody construct, said period ranging from 30 minutes to 3 days prior to administration of the antibody construct,
wherein also said at least one optional further dose of said inhibitor/antagonist of TNF/TNFR that reduces TNF/TNFR signaling and/or said inhibitor/antagonist of IL6/IL6R that reduces IL6/IL6R signaling according to (b) is administered within a second period before administration of the antibody construct, and optionally
wherein said at least one other dose of said inhibitor/antagonist of TNF/TNFR that reduces TNF/TNFR signaling and/or said inhibitor/antagonist of IL6/IL6R that reduces IL6/IL6R signaling according to (b) is administered within a third period following administration of said antibody construct.

12. The method of any one of claims 1 to 11, wherein said first dose, and optionally also at least one further dose of said inhibitor/antagonist of TNF/TNFR that reduces TNF/TNFR signaling and/or said inhibitor/antagonist of IL6/IL6R that reduces IL6/IL6R signaling according to (b) is/are administered before administration of said antibody construct, and wherein the at least one further dose of said inhibitor/antagonist of TNF/TNFR that reduces TNF/TNFR signaling and/or said inhibitor/antagonist of IL6/IL6R that reduces IL6/IL6R signaling according to (b) is administered following administration of said antibody construct,
wherein the first dose of said inhibitor/antagonist of TNF/TNFR that reduces TNF/TNFR signaling and/or said inhibitor/antagonist of IL6/IL6R that reduces IL6/IL6R signaling according to (b) is administered within a first period before administration of the antibody construct, particularly wherein the inhibitor/antagonist of TNF/TNFR that reduces TNF/TNFR signaling (b) and/or said inhibitor/antagonist of IL6/IL6R that reduces IL6/IL6R signaling is selected from etanercept and/or tocilicumab, said period ranging from 30 minutes to 2 days prior to administration of the antibody construct, particularly wherein the target antigen is Flt3 or CD33,
wherein also said at least one further dose of said inhibitor/antagonist of TNF/TNFR that reduces TNF/TNFR signaling and/or said inhibitor/antagonist of IL6/IL6R that reduces IL6/IL6R signaling according to (b) is administered within a second period before administration of the antibody construct, and optionally
wherein said inhibitor/antagonist of TNF/TNFR that reduces TNF/TNFR signaling and/or said inhibitor/antagonist of IL6/IL6R that reduces IL6/IL6R signaling according to (b) is administered within a third period following administration of said antibody construct.

13. The method of any one of claims 1 to 12, wherein said first dose, and optionally also at least one further dose of said inhibitor/antagonist of TNF/TNFR that reduces TNF/TNFR signaling and/or said inhibitor/antagonist of IL6/IL6R that reduces IL6/IL6R signaling according to (b) is/are administered before administration of said antibody construct, and wherein the at least one further dose of said inhibitor/antagonist of TNF/TNFR that reduces TNF/TNFR signaling and/or said inhibitor/antagonist of IL6/IL6R that reduces IL6/IL6R signaling according to (b) is administered following administration of said antibody construct,
wherein the first dose of said inhibitor/antagonist of TNF/TNFR that reduces TNF/TNFR signaling and/or said inhibitor/antagonist of IL6/IL6R that reduces IL6/IL6R signaling according to (b) is administered within a first period before administration of the antibody construct, particularly wherein said inhibitor/antagonist of TNF/TNFR that reduces TNF/TNFR signaling and/or said inhibitor/antagonist of IL6/IL6R that reduces IL6/IL6R signaling according to (b) is selected from etanercept and/or tocilicumab, said period ranging from 30 minutes to 1 day prior to administration of the antibody construct, particularly wherein the target antigen is Flt3 or CD33, more particularly wherein the target antigen is CD33,
wherein also said at least one further dose of said inhibitor/antagonist of TNF/TNFR that reduces TNF/TNFR signaling and/or said inhibitor/antagonist of IL6/IL6R that reduces IL6/IL6R signaling according to (b) is administered within a second period before administration of the antibody construct, and optionally
wherein said at least one other dose of said inhibitor/antagonist of TNF/TNFR that reduces TNF/TNFR signaling and/or said inhibitor/antagonist of IL6/IL6R that reduces IL6/IL6R signaling according to (b) is administered within a third period following administration of said antibody construct.

14. The method of any one of claims 1 to 13, wherein said first dose, and optionally also said at least one further dose of said inhibitor/antagonist of TNF/TNFR that reduces TNF/TNFR signaling and/or said inhibitor/antagonist of IL6/IL6R that reduces IL6/IL6R signaling according to (b) is administered following administration of said antibody construct,
wherein the first dose of said inhibitor/antagonist of TNF/TNFR that reduces TNF/TNFR signaling and/or said inhibitor/antagonist of IL6/IL6R that reduces IL6/IL6R signaling according to (b) is administered within a first period before administration of the antibody construct, particularly wherein said inhibitor/antagonist of TNF/TNFR that reduces TNF/TNFR signaling and/or said inhibitor/antagonist of IL6/IL6R that reduces IL6/IL6R signaling according to (b) is selected from etanercept and/or tocilicumab,
wherein also said inhibitor/antagonist of TNF/TNFR that reduces TNF/TNFR signaling and/or said inhibitor/antagonist of IL6/IL6R that reduces IL6/IL6R signaling according to (b) is administered within a second period before administration of the antibody construct, wherein said period is shorter than the first period of administration of the inhibitor, and optionally
wherein said inhibitor/antagonist of TNF/TNFR that reduces TNF/TNFR signaling and/or said inhibitor/antagonist of IL6/IL6R that reduces IL6/IL6R signaling according to (b) is administered within a third period following administration of said antibody construct.

15. The method of any one of claims 1 to 14, wherein said first dose, optionally also said at least one further dose of said inhibitor/antagonist of TNF/TNFR that reduces TNF/TNFR signaling and/or said inhibitor/antagonist of IL6/IL6R that reduces IL6/IL6R signaling according to (b) is/are administered before administration of said antibody construct, and wherein optionally the at least one further dose of said inhibitor/antagonist of TNF/TNFR that reduces TNF/TNFR signaling and/or said inhibitor/antagonist of IL6/IL6R that reduces IL6/IL6R signaling according to (b) is administered following administration of said antibody construct,
wherein the first dose of said inhibitor/antagonist of TNF/TNFR that reduces TNF/TNFR signaling and/or said inhibitor/antagonist of IL6/IL6R that reduces IL6/IL6R signaling according to (b) is administered within a first period before administration of the antibody construct, particularly wherein said inhibitor/antagonist of TNF/TNFR that reduces TNF/TNFR signaling and/or said inhibitor/antagonist of IL6/IL6R that reduces IL6/IL6R signaling according to (b) is selected from etanercept and/or tocilicumab,
wherein also the further said inhibitor/antagonist of TNF/TNFR that reduces TNF/TNFR signaling and/or said inhibitor/antagonist of IL6/IL6R that reduces IL6/IL6R signaling according to (b) is administered within a second period before administration of the antibody construct,
wherein said second period is shorter than the first period of administration of said inhibitor/antagonist of TNF/TNFR that reduces TNF/TNFR signaling and/or said inhibitor/antagonist of IL6/IL6R that reduces IL6/IL6R signaling according to (b),
wherein the further dose of said inhibitor/antagonist of TNF/TNFR that reduces TNF/TNFR signaling and/or said inhibitor/antagonist of IL6/IL6R that reduces IL6/IL6R signaling according to (b) is administered within a period ranging from 30 minutes to 5 days, 30 minutes to 4 days, 30 minutes to 3 days, 30 minutest to 2 days, particularly 30 minutes to 1 day prior to administration of the antibody construct, and optionally
wherein said at least one other dose of said inhibitor/antagonist of TNF/TNFR that reduces TNF/TNFR signaling and/or said inhibitor/antagonist of IL6/IL6R that reduces IL6/IL6R signaling according to (b) is administered within a third period following administration of said antibody construct.

16. The method of any one of claims 1 to 15, wherein said first dose, optionally also said at least one further dose of said inhibitor/antagonist of TNF/TNFR that reduces TNF/TNFR signaling and/or said inhibitor/antagonist of IL6/IL6R that reduces IL6/IL6R signaling according to (b) is/are administered before administration of said antibody construct, and optionally wherein at least one further dose of said inhibitor/antagonist of TNF/TNFR that reduces TNF/TNFR signaling and/or said inhibitor/antagonist of IL6/IL6R that reduces IL6/IL6R signaling according to (b) is administered following administration of said antibody construct,
wherein the first dose of said inhibitor/antagonist of TNF/TNFR that reduces TNF/TNFR signaling and/or said inhibitor/antagonist of IL6/IL6R that reduces IL6/IL6R signaling according to (b) is administered within a first period before administration of the antibody construct, particularly wherein the inhibitor/antagonist of TNF/TNFR that reduces TNF/TNFR signaling (b) and/or said inhibitor/antagonist of IL6/IL6R that reduces IL6/IL6R signaling is selected from etanercept and/or tocilicumab,
wherein also said at least one further dose of said inhibitor/antagonist of TNF/TNFR that reduces TNF/TNFR signaling and/or said inhibitor/antagonist of IL6/IL6R that reduces IL6/IL6R signaling according to (b) is administered within a second period before administration of the antibody construct,
wherein said second period is shorter than the first period of administration of said inhibitor/antagonist of TNF/TNFR that reduces TNF/TNFR signaling and/or said inhibitor/antagonist of IL6/IL6R that reduces IL6/IL6R signaling according to (b),
wherein the further dose of said inhibitor/antagonist of TNF/TNFR that reduces TNF/TNFR signaling and/or said inhibitor/antagonist of IL6/IL6R that reduces IL6/IL6R signaling according to (b) is administered within a period ranging from 30 minutes to 5 days, 30 minutes to 4 days, 30 minutes to 3 days, 30 minutest to 2 days, particularly 30 minutes to 1 day prior to administration of the antibody construct, and optionally
wherein said at least one other dose of said inhibitor/antagonist of TNF/TNFR that reduces TNF/TNFR signaling and/or said inhibitor/antagonist of IL6/IL6R that reduces IL6/IL6R signaling according to (b) is administered within a third period following administration of said antibody construct,
wherein the first dose and at least one further dose of said inhibitor/antagonist of TNF/TNFR that reduces TNF/TNFR signaling and/or said inhibitor/antagonist of IL6/IL6R that reduces IL6/IL6R signaling according to (b) comprise different quantities of inhibitor and/or different quantities of the antibody construct.

17. The method of any one of claims 1 to 16, wherein said first dose, optionally also said at least one further dose of said inhibitor/antagonist of TNF/TNFR that reduces TNF/TNFR signaling and/or said inhibitor/antagonist of IL6/IL6R that reduces IL6/IL6R signaling according to (b) is/are administered before administration of said antibody construct, and optionally wherein at least one further dose of said inhibitor/antagonist of TNF/TNFR that reduces TNF/TNFR signaling and/or said inhibitor/antagonist of IL6/IL6R that reduces IL6/IL6R signaling according to (b) is administered following administration of said antibody construct,
wherein the first dose of said inhibitor/antagonist of TNF/TNFR that reduces TNF/TNFR signaling and/or said inhibitor/antagonist of IL6/IL6R that reduces IL6/IL6R signaling according to (b) is administered within a first period before administration of the antibody construct, particularly wherein said inhibitor/antagonist of TNF/TNFR that reduces TNF/TNFR signaling and/or said inhibitor/antagonist of IL6/IL6R that reduces IL6/IL6R signaling according to (b) is selected from etanercept and/or tocilicumab,
wherein also said at least one further dose of said inhibitor/antagonist of TNF/TNFR that reduces TNF/TNFR signaling and/or said inhibitor/antagonist of IL6/IL6R that reduces IL6/IL6R signaling according to (b) is administered within a second period before administration of the antibody construct, and optionally
wherein said at least one other dose of said inhibitor/antagonist of TNF/TNFR that reduces TNF/TNFR signaling and/or said inhibitor/antagonist of IL6/IL6R that reduces IL6/IL6R signaling according to (b) is administered within a third period following administration of said antibody construct,
wherein the first dose and at least one further dose of said inhibitor/antagonist of TNF/TNFR that reduces TNF/TNFR signaling and/or said inhibitor/antagonist of IL6/IL6R that reduces IL6/IL6R signaling according to (b) comprise identical quantities of inhibitor and/or identical quantities of the antibody construct.

18. The method of any one of claims 1 to 17, wherein said first dose, optionally also said at least one further dose of said inhibitor/antagonist of TNF/TNFR that reduces TNF/TNFR signaling and/or said inhibitor/antagonist of IL6/IL6R that reduces IL6/IL6R signaling according to (b) is/are administered before administration of said antibody construct, and optionally wherein at least one further dose of said inhibitor/antagonist of TNF/TNFR that reduces TNF/TNFR signaling and/or said inhibitor/antagonist of IL6/IL6R that reduces IL6/IL6R signaling according to (b) is administered following administration of said antibody construct,
wherein the first dose of said inhibitor/antagonist of TNF/TNFR that reduces TNF/TNFR signaling and/or said inhibitor/antagonist of IL6/IL6R that reduces IL6/IL6R signaling according to (b) is administered within a first period before administration of the antibody construct, particularly wherein said inhibitor/antagonist of TNF/TNFR that reduces TNF/TNFR signaling and/or said inhibitor/antagonist of IL6/IL6R that reduces IL6/IL6R signaling according to (b) is selected from etanercept and/or tocilicumab,
wherein also said at least one further dose of said inhibitor/antagonist of TNF/TNFR that reduces TNF/TNFR signaling and/or said inhibitor/antagonist of IL6/IL6R that reduces IL6/IL6R signaling according to (b) is administered within a second period before administration of the antibody construct, and optionally
wherein said at least one other dose of said inhibitor/antagonist of TNF/TNFR that reduces TNF/TNFR signaling and/or said inhibitor/antagonist of IL6/IL6R that reduces IL6/IL6R signaling according to (b) is administered within a third period following administration of said antibody construct,
wherein another dose of said inhibitor/antagonist of TNF/TNFR that reduces TNF/TNFR signaling and/or said inhibitor/antagonist of IL6/IL6R that reduces IL6/IL6R signaling according to (b) is administered following administration of said antibody construct within a period from 1 day to 7 days following a first administration of a dose of said antibody construct.

19. The method of any one of claims 1 to 18, wherein said first dose, optionally also said at least one further dose of said inhibitor/antagonist of TNF/TNFR that reduces TNF/TNFR signaling and/or said inhibitor/antagonist of IL6/IL6R that reduces IL6/IL6R signaling according to (b) is/are administered before administration of said antibody construct, and optionally wherein at least one further dose of said inhibitor/antagonist of TNF/TNFR that reduces TNF/TNFR signaling and/or said inhibitor/antagonist of IL6/IL6R that reduces IL6/IL6R signaling according to (b) is administered following administration of said antibody construct,
wherein the first dose of said inhibitor/antagonist of TNF/TNFR that reduces TNF/TNFR signaling and/or said inhibitor/antagonist of IL6/IL6R that reduces IL6/IL6R signaling according to (b) is administered within a first period before administration of the antibody construct, particularly wherein said inhibitor/antagonist of TNF/TNFR that reduces TNF/TNFR signaling and/or said inhibitor/antagonist of IL6/IL6R that reduces IL6/IL6R signaling according to (b) is selected from etanercept and/or tocilicumab,
wherein also said at least one further dose of said inhibitor/antagonist of TNF/TNFR that reduces TNF/TNFR signaling and/or said inhibitor/antagonist of IL6/IL6R that reduces IL6/IL6R signaling according to (b) is administered within a second period before administration of the antibody construct, and optionally
wherein said at least one other dose of said inhibitor/antagonist of TNF/TNFR that reduces TNF/TNFR signaling and/or said inhibitor/antagonist of IL6/IL6R that reduces IL6/IL6R signaling according to (b) is administered within a third period following administration of said antibody construct,
wherein another dose of said inhibitor/antagonist of TNF/TNFR that reduces TNF/TNFR signaling and/or said inhibitor/antagonist of IL6/IL6R that reduces IL6/IL6R signaling according to (b) is administered following administration of said antibody construct within a period from 1 day to 6 days following a first administration of a dose of said antibody construct.

20. The method of any one of claims 1 to 19, wherein said first dose, and optionally said also at least one further dose of said inhibitor/antagonist of TNF/TNFR that reduces TNF/TNFR signaling and/or said inhibitor/antagonist of IL6/IL6R that reduces IL6/IL6R signaling according to (b) is/are administered before administration of said antibody construct, and optionally wherein at least one further dose of said inhibitor/antagonist of TNF/TNFR that reduces TNF/TNFR signaling and/or said inhibitor/antagonist of IL6/IL6R that reduces IL6/IL6R signaling according to (b) is administered following administration of said antibody construct,
wherein the first dose of said inhibitor/antagonist of TNF/TNFR that reduces TNF/TNFR signaling and/or said inhibitor/antagonist of IL6/IL6R that reduces IL6/IL6R signaling according to (b) is administered within a first period before administration of the antibody construct, particularly wherein said inhibitor/antagonist of TNF/TNFR that reduces TNF/TNFR signaling and/or said inhibitor/antagonist of IL6/IL6R that reduces IL6/IL6R signaling according to (b) is selected from etanercept and/or tocilicumab,
wherein also said at least one further dose of said inhibitor/antagonist of TNF/TNFR that reduces TNF/TNFR signaling and/or said inhibitor/antagonist of IL6/IL6R that reduces IL6/IL6R signaling according to (b) is administered within a second period before administration of the antibody construct, and optionally
wherein said at least one other dose of said inhibitor/antagonist of TNF/TNFR that reduces TNF/TNFR signaling and/or said inhibitor/antagonist of IL6/IL6R that reduces IL6/IL6R signaling according to (b) is administered within a third period following administration of said antibody construct,
wherein another dose of said inhibitor/antagonist of TNF/TNFR that reduces TNF/TNFR signaling and/or said inhibitor/antagonist of IL6/IL6R that reduces IL6/IL6R signaling according to (b) is administered following administration of said antibody construct within a period from 1 hour to 5 days following a first administration of a dose of said antibody construct.

21. The method of any one of claims 1 to 20, wherein said first dose, and optionally also said at least one further dose of said inhibitor/antagonist of TNF/TNFR that reduces TNF/TNFR signaling and/or said inhibitor/antagonist of IL6/IL6R that reduces IL6/IL6R signaling according to (b) is/are administered before administration of said antibody construct, and optionally wherein at least one further dose of said inhibitor/antagonist of TNF/TNFR that reduces TNF/TNFR signaling and/or said inhibitor/antagonist of IL6/IL6R that reduces IL6/IL6R signaling according to (b) is administered following administration of said antibody construct,
wherein the first dose of said inhibitor/antagonist of TNF/TNFR that reduces TNF/TNFR signaling and/or said inhibitor/antagonist of IL6/IL6R that reduces IL6/IL6R signaling according to (b) is administered within a first period before administration of the antibody construct, particularly wherein said inhibitor/antagonist of TNF/TNFR that reduces TNF/TNFR signaling and/or said inhibitor/antagonist of IL6/IL6R that reduces IL6/IL6R signaling according to (b) is selected from etanercept and/or tocilicumab,
wherein also said at least one further dose of said inhibitor/antagonist of TNF/TNFR that reduces TNF/TNFR signaling and/or said inhibitor/antagonist of IL6/IL6R that reduces IL6/IL6R signaling according to (b) is administered within a second period before administration of the antibody construct, and optionally
wherein said at least one other dose said inhibitor/antagonist of TNF/TNFR that reduces TNF/TNFR signaling and/or said inhibitor/antagonist of IL6/IL6R that reduces IL6/IL6R signaling according to (b) is administered within a third period following administration of said antibody construct,
wherein another dose of said inhibitor/antagonist of TNF/TNFR that reduces TNF/TNFR signaling and/or said inhibitor/antagonist of IL6/IL6R that reduces IL6/IL6R signaling according to (b) is administered following administration of said antibody construct within a period from 1 hour to 4 days following a first administration of a dose of said antibody construct.

22. The method of any one of claims 1 to 21, wherein said first dose, and optionally also said at least one further dose of said inhibitor/antagonist of TNF/TNFR that reduces TNF/TNFR signaling and/or said inhibitor/antagonist of IL6/IL6R that reduces IL6/IL6R signaling according to (b) is/are administered before administration of said antibody construct, and optionally wherein at least one further dose of said inhibitor/antagonist of TNF/TNFR that reduces TNF/TNFR signaling and/or said inhibitor/antagonist of IL6/IL6R that reduces IL6/IL6R signaling according to (b) is administered following administration of said antibody construct,
wherein the first dose of said inhibitor/antagonist of TNF/TNFR that reduces TNF/TNFR signaling and/or said inhibitor/antagonist of IL6/IL6R that reduces IL6/IL6R signaling according to (b) is administered within a first period before administration of the antibody construct, particularly wherein said inhibitor/antagonist of TNF/TNFR that reduces TNF/TNFR signaling and/or said inhibitor/antagonist of IL6/IL6R that reduces IL6/IL6R signaling according to (b) is selected from etanercept and/or tocilicumab,
wherein also said at least one further dose of said inhibitor/antagonist of TNF/TNFR that reduces TNF/TNFR signaling and/or said inhibitor/antagonist of IL6/IL6R that reduces IL6/IL6R signaling according to (b) is administered within a second period before administration of the antibody construct, and optionally
wherein said at least one other dose of said inhibitor/antagonist of TNF/TNFR that reduces TNF/TNFR signaling and/or said inhibitor/antagonist of IL6/IL6R that reduces IL6/IL6R signaling according to (b) is administered within a third period following administration of said antibody construct,
wherein another dose of said inhibitor/antagonist of TNF/TNFR that reduces TNF/TNFR signaling and/or said inhibitor/antagonist of IL6/IL6R that reduces IL6/IL6R signaling according to (b) is administered following administration of said antibody construct within a period from 1 hour to 3 days following a first administration of a dose of said antibody construct.

23. The method of any one of claims 1 to 22, wherein said first dose, and optionally also said at least one further dose of said inhibitor/antagonist of TNF/TNFR that reduces TNF/TNFR signaling and/or said inhibitor/antagonist of IL6/IL6R that reduces IL6/IL6R signaling according to (b) is/are administered before administration of said antibody construct, and optionally wherein at least one further dose of said inhibitor/antagonist of TNF/TNFR that reduces TNF/TNFR signaling and/or said inhibitor/antagonist of IL6/IL6R that reduces IL6/IL6R signaling according to (b) is administered following administration of said antibody construct,
wherein the first dose of said inhibitor/antagonist of TNF/TNFR that reduces TNF/TNFR signaling and/or said inhibitor/antagonist of IL6/IL6R that reduces IL6/IL6R signaling according to (b) is administered within a first period before administration of the antibody construct, particularly wherein said inhibitor/antagonist of TNF/TNFR that reduces TNF/TNFR signaling and/or said inhibitor/antagonist of IL6/IL6R that reduces IL6/IL6R signaling according to (b) is selected from etanercept and/or tocilicumab,
wherein also said at least one further dose of said inhibitor/antagonist of TNF/TNFR that reduces TNF/TNFR signaling and/or said inhibitor/antagonist of IL6/IL6R that reduces IL6/IL6R signaling according to (b) is administered within a second period before administration of the antibody construct, and optionally
wherein said at least one other dose of said inhibitor/antagonist of TNF/TNFR that reduces TNF/TNFR signaling and/or said inhibitor/antagonist of IL6/IL6R that reduces IL6/IL6R signaling according to (b) is administered within a third period following administration of said antibody construct,
wherein another dose of said inhibitor/antagonist of TNF/TNFR that reduces TNF/TNFR signaling and/or said inhibitor/antagonist of IL6/IL6R that reduces IL6/IL6R signaling according to (b) is administered following administration of said antibody construct within a period from 1 hour to 2 days following a first administration of a dose of said antibody construct.

24. The method of any one of claims 1 to 21,
wherein said target antigen is CD33, particularly wherein the antibody construct comprises a first domain that comprises the CDR sequences as depicted in SEQ ID NOs: 317-319 and 323-325, and
wherein the first dose of said inhibitor/antagonist of TNF/TNFR that reduces TNF/TNFR signaling and/or said inhibitor/antagonist of IL6/IL6R that reduces IL6/IL6R signaling according to (b) is administered about 1 day before administration of the antibody construct, particularly wherein said inhibitor/antagonist of TNF/TNFR that reduces TNF/TNFR signaling and/or said inhibitor/antagonist of IL6/IL6R that reduces IL6/IL6R signaling according to (b) is selected from etanercept and/or tocilicumab,
wherein said at least one further dose of said inhibitor/antagonist of TNF/TNFR that reduces TNF/TNFR signaling and/or said inhibitor/antagonist of IL6/IL6R that reduces IL6/IL6R signaling according to (b) is administered about 4 days following administration of said antibody construct.

25. The method of any one of claims 1 to 21, wherein said target antigen is CD33, particularly wherein the antibody construct comprises a first domain that comprises the CDR sequences as depicted in SEQ ID NOs: 317-319 and 323-325, and
wherein the first dose of said inhibitor/antagonist of TNF/TNFR that reduces TNF/TNFR signaling is administered about 1 day before administration of the antibody construct, particularly wherein the inhibitor/antagonist of TNF/TNFR that reduces TNF/TNFR signaling (b) is etanercept,
wherein said at least one dose of said inhibitor/antagonist of TNF/TNFR that reduces TNF/TNFR signaling (b), particularly etanercept, is administered about 4 days following administration of said antibody construct.

26. The method of any one of claims 1 to 23,
wherein said target antigen is CD33, particularly wherein the antibody construct comprises a first domain that comprises the CDR sequences as depicted in SEQ ID NOs: 317-319 and 323-325, and
wherein a first dose of said inhibitor/antagonist of IL6/IL6R that reduces IL6/IL6R signaling is administered before administration of the antibody construct, particularly wherein inhibitor/antagonist of IL6/IL6R that reduces IL6/IL6R signaling (c) is tocilicumab,
wherein said dose is administered about 1 hour before administration of the antibody construct, optionally before administration of every dose of antibody construct.

27. The method of any one of claims 1 to 23,
wherein said target antigen is Flt3, particularly wherein the antibody construct has a first domain comprising the CDR sequences depicted in SEQ ID NOs: 721 to 726, or wherein the first domain has VH and VL sequences as depicted in SEQ ID NOs: 727 and 728, and
wherein the first dose of said inhibitor/antagonist of TNF/TNFR that reduces TNF/TNFR signaling (b) is administered about 2 days before administration of the antibody construct, wherein the inhibitor/antagonist of TNF/TNFR that reduces TNF/TNFR signaling (b) is etanercept.

28. The method of any one of claims 1 to 23, wherein said target antigen is Flt3 particularly wherein the antibody construct has a first domain comprising the CDR sequences depicted in SEQ ID NOs: 721 to 726, or wherein the first domain has VH and VL sequences as depicted in SEQ ID NOs: 727 and 728, and
wherein a first dose of said inhibitor/antagonist of IL6/IL6R that reduces IL6/IL6R signaling is administered before administration of the antibody construct, particularly wherein inhibitor/antagonist of IL6/IL6R that reduces IL6/IL6R signaling (c) is tocilicumab,
wherein said dose is administered about 1 hour before administration of the antibody construct, optionally before administration of every dose of antibody construct.

29. The method of any one of claims 1 to 23, wherein said target antigen is BCMA, particularly wherein the antibody construct has a first domain comprising the sequence depicted in SEQ ID NO: 1293 or a derivative thereof comprising at least the 6 CDR in SEQ ID NO: 1285 to 1290 or comprising the VL and/or VH regions depicted in SEQ ID NO: 1291 and 1292, and
wherein a first dose of said inhibitor/antagonist of IL6/IL6R that reduces IL6/IL6R signaling is administered before administration of the antibody construct, particularly wherein inhibitor/antagonist of IL6/IL6R that reduces IL6/IL6R signaling (c) is tocilicumab,
wherein said dose is administered about 1 hour before administration of the antibody construct, optionally before administration of every dose of antibody construct.

30. The method of any one of claims 1 to 23, wherein said target antigen is Claudin 18.2 particularly wherein the antibody construct has a first domain comprising the sequence depicted in SEQ ID NO: 1294 or a derivative thereof comprising at least the 6 CDR comprised in SEQ ID NO: 1294 or comprising the VL and/or VH regions depicted in SEQ ID NO: 1294, and
wherein a first dose of said inhibitor/antagonist of IL6/IL6R that reduces IL6/IL6R signaling is administered before administration of the antibody construct, particularly wherein inhibitor/antagonist of IL6/IL6R that reduces IL6/IL6R signaling (c) is tocilicumab,
wherein said dose is administered about 1 hour before administration of the antibody construct, optionally before administration of every dose of antibody construct.

31. The method of any one of claims 1 to 23, wherein said target antigen is Mucin 17 particularly wherein the antibody construct has a first domain comprising the sequence depicted in SEQ ID NO: 1295 or a derivative thereof comprising at least the 6 CDR comprised in SEQ ID NO: 1295 or comprising the VL and/or VH regions depicted in SEQ ID NO: 1295, and
wherein a first dose of said inhibitor/antagonist of IL6/IL6R that reduces IL6/IL6R signaling is administered before administration of the antibody construct, particularly wherein inhibitor/antagonist of IL6/IL6R that reduces IL6/IL6R signaling (c) is tocilicumab,
wherein said dose is administered about 1 hour before administration of the antibody construct, optionally before administration of every dose of antibody construct.

32. The method of any one of the preceding claims, further comprising administering at least one corticosteroid and/or a non-glucocorticoidal compound.

33. The method of any one of the preceding claims, wherein said corticostoid is dexamethasone, and/or said non-glucocorticoidal compound is selected from the group comprising natalizumab, PPS, and minocylin.

34. The method of any one of claims 1 to 33, further comprising the administration of a corticoid compound, particularly dexamethasone, before administration of more that one dose of said antibody construct.

35. The method of any one of claims 1 to 23 and 32 to 34, wherein the target antigen is BCMA and the disease selected from a B cell disorder correlating with BCMA expression, a plasma cell disorder, particularly multiple myeloma, or an autoimmune disease.

36. The method of any one of claims 1 to 26 and 32 to 34, wherein the target antigen is Claudin 18.2 and the cancer is a gastrointestinal cancer selected from the group consisting of gastric cancer, esophageal cancer, gastroesophageal cancer, pancreatic cancer, and colorectal cancer.

37. The method of any one of claims 1 to 23 and 32 to 34, wherein the target antigen is Mucin 17 and the cancer is a gastrointestinal cancer selected from the group consisting of gastric cancer, esophageal cancer, gastroesophageal cancer, pancreatic cancer, and colorectal cancer.

38. The method of any one of claims 1 to 23 and 32 to 34, wherein the target antigen is PSMA and the cancer is a solid tumor, particularly prostate cancer or a cancer originating from a prostate cancer.

39. The method of any one of claims 1 to 23 and 32 to 34, wherein the target antigen is DLL3 and the cancer is a solid tumor selected from the group consisting of lung cancer, preferably SCLC, breast, cervical, colon, colorectal, endometrial, head and neck, liver, ovarian, pancreatic, prostate, skin, gastric, testis, thyroid, adrenal, renal, bladder, uterine, esophageal, urothelial and brain tumor or cancer, or a lymphoma, carcinoma, and sarcoma, and a metastatic cancer disease derived from any of the foregoing.

40. The method of any one of claims 1 to 25, 27, and 32 to 39, wherein the inhibitor/antagonist of TNF/TNFR that reduces TNF/TNFR signaling is etanercept, particularly wherein the dosage is administered subcutaneously.

41. The method of any one of claims 1 to 25, 27, and 32 to 40, wherein the inhibitor/antagonist of TNF/TNFR that reduces TNF/TNFR signaling is etanercept and the dosage is administered subcutaneously at a dose of between 10 mg to 100 mg.

42. The method of any one of claims 1 to 24, 26, and 32 to 39, wherein the inhibitor/antagonist of IL6/IL6R that reduces IL6/IL6R signaling is tocilizumab, particularly wherein the dosage is administered intravenously.

43. The method of any one of claims 1 to 24, 26, 32 to 39, and 42, wherein the inhibitor/antagonist of IL6/IL6R that reduces IL6/IL6R signaling is tocilizumab and the dosage is administered intravenously or at 1 mg/kg to 20 mg/kg.

44. The method of any one of the preceding claims 1 to 43, wherein the adverse event associated with immunotherapy is associated with increased cytokine release of TNF, IL-1, MCP-1, and/or IL-6, and wherein the group of adverse events optionally further comprises a neurological reaction, particularly one or more selected from the group consisting of: confusion, ataxia, disorientation, dysphasia, aphasia, speech impairment, cerebellar symptoms, tremor, apraxia, seizure, grand mal convulsion, palsy, and balance disorder.

45. The method of any one of the preceding claims 1-44, wherein the domain of said antibody construct that binds to CD3, binds to human CD3 epsilon and to Callithrix jacchus or Saimiri sciureus CD3 epsilon.

46. The method of any one of the preceding claims 1 to 45, wherein
a) the antibody construct is a single chain antibody construct,
b) the first domain is in the format of an scFv,
c) the second domain is in the format of an scFv,
d) the first and the second domain are connected via a linker, and/or
e) the antibody construct comprises a domain providing an extended serum half-life.

47. The method of any one of the preceding claims 1 to 46, wherein said inhibitor/antagonist of TNF/TNFR that reduces TNF/TNFR signaling and/or said inhibitor/antagonist of IL6/IL6R that reduces IL6/IL6R signaling according to (b), is selected from the group comprising small molecules, biological molecules, antibodies and derivatives thereof, and aptamers.

48. The method of any one of the preceding claims 1 to 25, 27, 32 to 41, 44 to 47, wherein the inhibitor/antagonist of TNF/TNFR that reduces TNF/TNFR signaling is selected from the group of TNF inhibitors/antagonists comprising etanercept, infliximab, adalimumab, certolizumab Pergol, and golimumab, particularly etanercept.

49. The method of any one of the preceding claims, wherein said patient is selected from the group of patients at risk of developing adverse events or having an intolerance to at least one of a group comprising corticosteroids, non-glucocorticoidal compounds, IL-6-inhibitors, IL-6R-inhibitors, and/or TNF/TNFR inhibitors different from an inhibitor/antagonist of TNF/TNFR that reduces TNF/TNFR signaling according to claim 48.

50. The method of any one of the preceding claims, wherein said patient is selected from the group of patients at risk of developing adverse events or having an intolerance to corticosteroids, optionally also wherein the corticosteroid is dexamethasone.

51. The method of any one of the preceding claims, wherein the step of administering an antibody construct that binds selectively to a target antigen on a cancer cell and to human CD3 on the surface of a T cell is the first exposure of said antibody construct.

52. The method of any one of the preceding claims 1 to 50, wherein the step of administering an antibody construct that binds selectively to a target antigen on a cancer cell and to human CD3 on the surface of a T cell is a re-exposure of the patient to said antibody construct.

53. The method of any one of claims 1 to 34, comprising the administration of a corticoid compound, particularly dexamethasone, before administration of more than one dose of said antibody construct, wherein said antibody construct is selected from CD19, CD33, FLT3, PSMA, BCMA, Claudin 6, Claudin 18.2, Mucin 17, and DLL3, particularly CD33, PSMA or FLT3, and wherein the wherein a first dose of said inhibitor/antagonist of TNF/TNFR that reduces TNF/TNFR signaling is administered before administration of a first dose of said antibody construct (a) within a first period, said period ranging from 5 minutes to 7 days prior to administration of the antibody construct, particularly wherein said period is ranging from 15 minutes to 7 days prior to administration of the antibody construct, and wherein the inhibitor/antagonist of TNF/TNFR that reduces TNF/TNFR signaling is etanercept.

54. The method of any one of claims 1 to 34 and 53, comprising the administration of a corticoid compound, particularly dexamethasone, before administration of more than one dose of said antibody construct, wherein said antibody construct is CD33, PSMA or FLT3, and wherein the wherein a first dose of said inhibitor/antagonist of TNF/TNFR that reduces TNF/TNFR signaling is administered before administration of a first dose of said antibody construct (a) within a first period, said period ranging from 5 minutes to 7 days prior to administration of the antibody construct, particularly wherein said period is ranging from 15 minutes to 7 days prior to administration of the antibody construct, and wherein the inhibitor/antagonist of TNF/TNFR that reduces TNF/TNFR signaling is etanercept.

55. The method of any one of claims 1 to 34, comprising the administration of dexamethasone before administration of one dose of said antibody construct, wherein said antibody construct is CD33, and wherein the wherein a first dose of said inhibitor/antagonist of TNF/TNFR that reduces TNF/TNFR signaling is administered before administration of a first dose of said antibody construct (a) within a first period, said period ranging from 5 minutes to 7 days prior to administration of the antibody construct, particularly wherein said period is ranging from 15 minutes to 7 days prior to administration of the antibody construct, and wherein the inhibitor/antagonist of TNF/TNFR that reduces TNF/TNFR signaling is etanercept.

56. The method of any one of claims 1 to 34, comprising the administration of dexamethasone before administration of one dose of said antibody construct, wherein said antibody construct is Flt3, and wherein the wherein a first dose of said inhibitor/antagonist of TNF/TNFR that reduces TNF/TNFR signaling is administered before administration of a first dose of said antibody construct (a) within a first period, said period ranging from 5 minutes to 7 days prior to administration of the antibody construct, particularly wherein said period is ranging from 15 minutes to 7 days prior to administration of the antibody construct, and wherein the inhibitor/antagonist of TNF/TNFR that reduces TNF/TNFR signaling is etanercept.

57. The method of any one of claims 1 to 34, comprising the administration of dexamethasone before administration of one dose of said antibody construct, wherein said antibody construct is PSMA, and wherein the wherein a first dose of said inhibitor/antagonist of TNF/TNFR that reduces TNF/TNFR signaling is administered before administration of a first dose of said antibody construct (a) within a first period, said period ranging from 5 minutes to 7 days prior to administration of the antibody construct, particularly wherein said period is ranging from 15 minutes to 7 days prior to administration of the antibody construct, and wherein the inhibitor/antagonist of TNF/TNFR that reduces TNF/TNFR signaling is etanercept.

The application's sequence listing, which the Patent Office published only in electronic form, follows.

SEQUENCE LISTING (1295 sequences)

SEQ ID NO: 1 - protein, 105 aa, Homo Sapiens
QDGNEEMGGITQTPYKVSISGTTVILTCPQYPGSEILWQHNDKNIGGDEDDKNIGSDEDHLSLKEFSELEQSGYYVCYPRGSKPEDANFYLYLRARVCENCMEMD

SEQ ID NO: 2 - protein, 27 aa, Homo Sapiens
QDGNEEMGGITQTPYKVSISGTTVILT

SEQ ID NO: 3 - protein, 14 aa, Artificial Sequence
  Synthetic
GSSTGAVTSGYYPN

SEQ ID NO: 4 - protein, 7 aa, Artificial Sequence
  Synthetic
GTKFLAP

SEQ ID NO: 5 - protein, 9 aa, Artificial Sequence
  Synthetic
ALWYSNRWV

SEQ ID NO: 6 - protein, 14 aa, Artificial Sequence
  Synthetic
RSSTGAVTSGYYPN

SEQ ID NO: 7 - protein, 7 aa, Artificial Sequence
  Synthetic
ATDMRPS

SEQ ID NO: 8 - protein, 9 aa, Artificial Sequence
  Synthetic
ALWYSNRWV

SEQ ID NO: 9 - protein, 14 aa, Artificial Sequence
  Synthetic
GSSTGAVTSGNYPN

SEQ ID NO: 10 - protein, 7 aa, Artificial Sequence
  Synthetic
GTKFLAP

SEQ ID NO: 11 - protein, 9 aa, Artificial Sequence
  Synthetic
VLWYSNRWV

SEQ ID NO: 12 - protein, 5 aa, Artificial Sequence
  Synthetic
IYAMN

SEQ ID NO: 13 - protein, 19 aa, Artificial Sequence
  Synthetic
RIRSKYNNYATYYADSVKS

SEQ ID NO: 14 - protein, 14 aa, Artificial Sequence
  Synthetic
HGNFGNSYVSFFAY

SEQ ID NO: 15 - protein, 5 aa, Artificial Sequence
  Synthetic
KYAMN

SEQ ID NO: 16 - protein, 19 aa, Artificial Sequence
  Synthetic
RIRSKYNNYATYYADSVKD

SEQ ID NO: 17 - protein, 14 aa, Artificial Sequence
  Synthetic
HGNFGNSYISYWAY

SEQ ID NO: 18 - protein, 5 aa, Artificial Sequence
  Synthetic
SYAMN

SEQ ID NO: 19 - protein, 19 aa, Artificial Sequence
  Synthetic
RIRSKYNNYATYYADSVKG

SEQ ID NO: 20 - protein, 14 aa, Artificial Sequence
  Synthetic
HGNFGNSYLSFWAY

SEQ ID NO: 21 - protein, 5 aa, Artificial Sequence
  Synthetic
RYAMN

SEQ ID NO: 22 - protein, 19 aa, Artificial Sequence
  Synthetic
RIRSKYNNYATYYADSVKG

SEQ ID NO: 23 - protein, 14 aa, Artificial Sequence
  Synthetic
HGNFGNSYLSYFAY

SEQ ID NO: 24 - protein, 5 aa, Artificial Sequence
  Synthetic
VYAMN

SEQ ID NO: 25 - protein, 19 aa, Artificial Sequence
  Synthetic
RIRSKYNNYATYYADSVKK

SEQ ID NO: 26 - protein, 14 aa, Artificial Sequence
  Synthetic
HGNFGNSYLSWWAY

SEQ ID NO: 27 - protein, 5 aa, Artificial Sequence
  Synthetic
KYAMN

SEQ ID NO: 28 - protein, 19 aa, Artificial Sequence
  Synthetic
RIRSKYNNYATYYADSVKS

SEQ ID NO: 29 - protein, 14 aa, Artificial Sequence
  Synthetic
HGNFGNSYTSYYAY

SEQ ID NO: 30 - protein, 5 aa, Artificial Sequence
  Synthetic
GYAMN

SEQ ID NO: 31 - protein, 19 aa, Artificial Sequence
  Synthetic
RIRSKYNNYATYYADSVKE

SEQ ID NO: 32 - protein, 14 aa, Artificial Sequence
  Synthetic
HRNFGNSYLSWFAY

SEQ ID NO: 33 - protein, 5 aa, Artificial Sequence
  Synthetic
VYAMN

SEQ ID NO: 34 - protein, 19 aa, Artificial Sequence
  Synthetic
RIRSKYNNYATYYADSVKK

SEQ ID NO: 35 - protein, 14 aa, Artificial Sequence
  Synthetic
HGNFGNSYISWWAY

SEQ ID NO: 36 - protein, 5 aa, Artificial Sequence
  Synthetic
SYAMN

SEQ ID NO: 37 - protein, 19 aa, Artificial Sequence
  Synthetic
RIRSKYNNYATYYADSVKG

SEQ ID NO: 38 - protein, 14 aa, Artificial Sequence
  Synthetic
HGNFGNSYVSWWAY

SEQ ID NO: 39 - protein, 5 aa, Artificial Sequence
  Synthetic
KYAMN

SEQ ID NO: 40 - protein, 19 aa, Artificial Sequence
  Synthetic
RIRSKYNNYATYYADSVKD

SEQ ID NO: 41 - protein, 14 aa, Artificial Sequence
  Synthetic
HGNFGNSYISYWAY

SEQ ID NO: 42 - protein, 7 aa, Artificial Sequence
  Synthetic
GTKFLAP

SEQ ID NO: 43 - protein, 9 aa, Artificial Sequence
  Synthetic
ALWYSNRWV

SEQ ID NO: 44 - protein, 5 aa, Artificial Sequence
  Synthetic
KYAMN

SEQ ID NO: 45 - protein, 14 aa, Artificial Sequence
  Synthetic
GSSTGAVTSGYYPN

SEQ ID NO: 46 - protein, 7 aa, Artificial Sequence
  Synthetic
GTKFLAP

SEQ ID NO: 47 - protein, 9 aa, Artificial Sequence
  Synthetic
ALWYSNRWV

SEQ ID NO: 48 - protein, 5 aa, Artificial Sequence
  Synthetic
SYAMN

SEQ ID NO: 49 - protein, 19 aa, Artificial Sequence
  Synthetic
RIRSKYNNYATYYADSVKG

SEQ ID NO: 50 - protein, 14 aa, Artificial Sequence
  Synthetic
HGNFGNSYLSFWAY

SEQ ID NO: 51 - protein, 14 aa, Artificial Sequence
  Synthetic
GSSTGAVTSGYYPN

SEQ ID NO: 52 - protein, 7 aa, Artificial Sequence
  Synthetic
GTKFLAP

SEQ ID NO: 53 - protein, 9 aa, Artificial Sequence
  Synthetic
ALWYSNRWV

SEQ ID NO: 54 - protein, 14 aa, Artificial Sequence
  Synthetic
RSSTGAVTSGYYPN

SEQ ID NO: 55 - protein, 7 aa, Artificial Sequence
  Synthetic
ATDMRPS

SEQ ID NO: 56 - protein, 9 aa, Artificial Sequence
  Synthetic
ALWYSNRWV

SEQ ID NO: 57 - protein, 14 aa, Artificial Sequence
  Synthetic
GSSTGAVTSGYYPN

SEQ ID NO: 58 - protein, 7 aa, Artificial Sequence
  Synthetic
GTKFLAP

SEQ ID NO: 59 - protein, 9 aa, Artificial Sequence
  Synthetic
ALWYSNRWV

SEQ ID NO: 60 - protein, 14 aa, Artificial Sequence
  Synthetic
GSSTGAVTSGYYPN

SEQ ID NO: 61 - protein, 7 aa, Artificial Sequence
  Synthetic
GTKFLAP

SEQ ID NO: 62 - protein, 9 aa, Artificial Sequence
  Synthetic
ALWYSNRWV

SEQ ID NO: 63 - protein, 14 aa, Artificial Sequence
  Synthetic
GSSTGAVTSGNYPN

SEQ ID NO: 64 - protein, 7 aa, Artificial Sequence
  Synthetic
GTKFLAP

SEQ ID NO: 65 - protein, 9 aa, Artificial Sequence
  Synthetic
VLWYSNRWV

SEQ ID NO: 66 - protein, 109 aa, Artificial Sequence
  Synthetic
QTVVTQEPSLTVSPGGTVTLTCGSSTGAVTSGYYPNWVQQKPGQAPRGLIGGTKFLAPGTPARFSGSLLGGKAALTLSGVQPEDEAEYYCALWYSNRWVFGGGTKLTVL

SEQ ID NO: 67 - protein, 109 aa, Artificial Sequence
  Synthetic
QTVVTQEPSLTVSPGGTVTLTCRSSTGAVTSGYYPNWVQQKPGQAPRGLIGATDMRPSGTPARFSGSLLGGKAALTLSGVQPEDEAEYYCALWYSNRWVFGGGTKLTVL

SEQ ID NO: 68 - protein, 109 aa, Artificial Sequence
  Synthetic
QTVVTQEPSLTVSPGGTVTLTCGSSTGAVTSGNYPNWVQQKPGQAPRGLIGGTKFLAPGTPARFSGSLLGGKAALTLSGVQPEDEAEYYCVLWYSNRWVFGGGTKLTVL

SEQ ID NO: 69 - protein, 109 aa, Artificial Sequence
  Synthetic
ELVVTQEPSLTVSPGGTVTLTCGSSTGAVTSGYYPNWVQQKPGQAPRGLIGGTKFLAPGTPARFSGSLLGGKAALTLSGVQPEDEAEYYCALWYSNRWVFGGGTKLTVL

SEQ ID NO: 70 - protein, 109 aa, Artificial Sequence
  Synthetic
ELVVTQEPSLTVSPGGTVTLTCRSSTGAVTSGYYPNWVQQKPGQAPRGLIGATDMRPSGTPARFSGSLLGGKAALTLSGVQPEDEAEYYCALWYSNRWVFGGGTKLTVL

SEQ ID NO: 71 - protein, 109 aa, Artificial Sequence
  Synthetic
ELVVTQEPSLTVSPGGTVTLTCGSSTGAVTSGNYPNWVQQKPGQAPRGLIGGTKFLAPGTPARFSGSLLGGKAALTLSGVQPEDEAEYYCVLWYSNRWVFGGGTKLTVL

SEQ ID NO: 72 - protein, 125 aa, Artificial Sequence
  Synthetic
EVQLVESGGGLVQPGGSLKLSCAASGFTFNIYAMNWVRQAPGKGLEWVARIRSKYNNYATYYADSVKSRFTISRDDSKNTAYLQMNNLKTEDTAVYYCVRHGNFGNSYVSFFAYWGQGTLVTVSS

SEQ ID NO: 73 - protein, 125 aa, Artificial Sequence
  Synthetic
EVQLVESGGGLVQPGGSLKLSCAASGFTFNKYAMNWVRQAPGKGLEWVARIRSKYNNYATYYADSVKDRFTISRDDSKNTAYLQMNNLKTEDTAVYYCVRHGNFGNSYISYWAYWGQGTLVTVSS

SEQ ID NO: 74 - protein, 125 aa, Artificial Sequence
  Synthetic
EVQLVESGGGLEQPGGSLKLSCAASGFTFNSYAMNWVRQAPGKGLEWVARIRSKYNNYATYYADSVKGRFTISRDDSKNTAYLQMNNLKTEDTAVYYCVRHGNFGNSYLSFWAYWGQGTLVTVSS

SEQ ID NO: 75 - protein, 125 aa, Artificial Sequence
  Synthetic
EVQLVESGGGLVQPGGSLKLSCAASGFTFNRYAMNWVRQAPGKGLEWVARIRSKYNNYATYYADSVKGRFTISRDDSKNTAYLQMNNLKTEDTAVYYCVRHGNFGNSYLSYFAYWGQGTLVTVSS

SEQ ID NO: 76 - protein, 125 aa, Artificial Sequence
  Synthetic
EVQLVESGGGLVQPGGSLKLSCAASGFTFNVYAMNWVRQAPGKGLEWVARIRSKYNNYATYYADSVKKRFTISRDDSKNTAYLQMNNLKTEDTAVYYCVRHGNFGNSYLSWWAYWGQGTLVTVSS

SEQ ID NO: 77 - protein, 125 aa, Artificial Sequence
  Synthetic
EVQLVESGGGLVQPGGSLKLSCAASGFTFNKYAMNWVRQAPGKGLEWVARIRSKYNNYATYYADSVKSRFTISRDDSKNTAYLQMNNLKTEDTAVYYCVRHGNFGNSYTSYYAYWGQGTLVTVSS

SEQ ID NO: 78 - protein, 125 aa, Artificial Sequence
  Synthetic
EVQLVESGGGLVQPGGSLKLSCAASGFTFNGYAMNWVRQAPGKGLEWVARIRSKYNNYATYYADSVKERFTISRDDSKNTAYLQMNNLKTEDTAVYYCVRHRNFGNSYLSWFAYWGQGTLVTVSS

SEQ ID NO: 79 - protein, 125 aa, Artificial Sequence
  Synthetic
EVQLVESGGGLVQPGGSLKLSCAASGFTFNVYAMNWVRQAPGKGLEWVARIRSKYNNYATYYADSVKKRFTISRDDSKNTAYLQMNNLKTEDTAVYYCVRHGNFGNSYISWWAYWGQGTLVTVSS

SEQ ID NO: 80 - protein, 125 aa, Artificial Sequence
  Synthetic
EVQLVESGGGLVQPGGSLKLSCAASGFTFNSYAMNWVRQAPGKGLEWVARIRSKYNNYATYYADSVKGRFTISRDDSKNTAYLQMNNLKTEDTAVYYCVRHGNFGNSYVSWWAYWGQGTLVTVSS

SEQ ID NO: 81 - protein, 125 aa, Artificial Sequence; identical to SEQ ID NO: 73
  Synthetic

SEQ ID NO: 82 - protein, 125 aa, Artificial Sequence
  Synthetic
EVQLVESGGGLVQPGGSLRLSCAASGFTFNSYAMNWVRQAPGKGLEWVARIRSKYNNYATYYADSVKGRFTISRDDSKNTAYLQMNSLKTEDTAVYYCVRHGNFGNSYVSWWAYWGQGTLVTVSS

SEQ ID NO: 83 - protein, 125 aa, Artificial Sequence
  Synthetic
EVQLLESGGGLVQPGGSLKLSCAASGFTFNIYAMNWVRQAPGKGLEWVARIRSKYNNYATYYADSVKSRFTISRDDSKNTAYLQMNNLKTEDTAVYYCVRHGNFGNSYVSFFAYWGQGTLVTVSS

SEQ ID NO: 84 - protein, 125 aa, Artificial Sequence
  Synthetic
EVQLLESGGGLVQPGGSLKLSCAASGFTFNKYAMNWVRQAPGKGLEWVARIRSKYNNYATYYADSVKDRFTISRDDSKNTAYLQMNNLKTEDTAVYYCVRHGNFGNSYISYWAYWGQGTLVTVSS

SEQ ID NO: 85 - protein, 125 aa, Artificial Sequence
  Synthetic
EVQLLESGGGLEQPGGSLKLSCAASGFTFNSYAMNWVRQAPGKGLEWVARIRSKYNNYATYYADSVKGRFTISRDDSKNTAYLQMNNLKTEDTAVYYCVRHGNFGNSYLSFWAYWGQGTLVTVSS

SEQ ID NO: 86 - protein, 125 aa, Artificial Sequence
  Synthetic
EVQLLESGGGLVQPGGSLKLSCAASGFTFNRYAMNWVRQAPGKGLEWVARIRSKYNNYATYYADSVKGRFTISRDDSKNTAYLQMNNLKTEDTAVYYCVRHGNFGNSYLSYFAYWGQGTLVTVSS

SEQ ID NO: 87 - protein, 125 aa, Artificial Sequence
  Synthetic
EVQLLESGGGLVQPGGSLKLSCAASGFTFNVYAMNWVRQAPGKGLEWVARIRSKYNNYATYYADSVKKRFTISRDDSKNTAYLQMNNLKTEDTAVYYCVRHGNFGNSYLSWWAYWGQGTLVTVSS

SEQ ID NO: 88 - protein, 125 aa, Artificial Sequence
  Synthetic
EVQLLESGGGLVQPGGSLKLSCAASGFTFNKYAMNWVRQAPGKGLEWVARIRSKYNNYATYYADSVKSRFTISRDDSKNTAYLQMNNLKTEDTAVYYCVRHGNFGNSYTSYYAYWGQGTLVTVSS

SEQ ID NO: 89 - protein, 125 aa, Artificial Sequence
  Synthetic
EVQLLESGGGLVQPGGSLKLSCAASGFTFNGYAMNWVRQAPGKGLEWVARIRSKYNNYATYYADSVKERFTISRDDSKNTAYLQMNNLKTEDTAVYYCVRHRNFGNSYLSWFAYWGQGTLVTVSS

SEQ ID NO: 90 - protein, 125 aa, Artificial Sequence
  Synthetic
EVQLLESGGGLVQPGGSLKLSCAASGFTFNVYAMNWVRQAPGKGLEWVARIRSKYNNYATYYADSVKKRFTISRDDSKNTAYLQMNNLKTEDTAVYYCVRHGNFGNSYISWWAYWGQGTLVTVSS

SEQ ID NO: 91 - protein, 125 aa, Artificial Sequence
  Synthetic
EVQLLESGGGLVQPGGSLKLSCAASGFTFNSYAMNWVRQAPGKGLEWVARIRSKYNNYATYYADSVKGRFTISRDDSKNTAYLQMNNLKTEDTAVYYCVRHGNFGNSYVSWWAYWGQGTLVTVSS

SEQ ID NO: 92 - protein, 125 aa, Artificial Sequence; identical to SEQ ID NO: 84
  Synthetic

SEQ ID NO: 93 - protein, 109 aa, Artificial Sequence; identical to SEQ ID NO: 66
  Synthetic

SEQ ID NO: 94 - protein, 109 aa, Artificial Sequence; identical to SEQ ID NO: 66
  Synthetic

SEQ ID NO: 95 - protein, 109 aa, Artificial Sequence; identical to SEQ ID NO: 66
  Synthetic

SEQ ID NO: 96 - protein, 109 aa, Artificial Sequence; identical to SEQ ID NO: 67
  Synthetic

SEQ ID NO: 97 - protein, 109 aa, Artificial Sequence; identical to SEQ ID NO: 66
  Synthetic

SEQ ID NO: 98 - protein, 109 aa, Artificial Sequence; identical to SEQ ID NO: 66
  Synthetic

SEQ ID NO: 99 - protein, 109 aa, Artificial Sequence; identical to SEQ ID NO: 68
  Synthetic

SEQ ID NO: 100 - protein, 109 aa, Artificial Sequence; identical to SEQ ID NO: 68
  Synthetic

SEQ ID NO: 101 - protein, 249 aa, Artificial Sequence
  Synthetic
EVQLVESGGGLVQPGGSLKLSCAASGFTFNIYAMNWVRQAPGKGLEWVARIRSKYNNYATYYADSVKSRFTISRDDSKNTAYLQMNNLKTEDTAVYYCVRHGNFGNSYVSFFAYWGQGTLVTVSSGGGGSGGGGSGGGGSQTVVTQEPSLTVSPGGTVTLTCGSSTGAVTSGYYPNWVQQKPGQAPRGLIGGTKFLAPGTPARFSGSLLGGKAALTLSGVQPEDEAEYYCALWYSNRWVFGGGTKLTVL

SEQ ID NO: 102 - protein, 249 aa, Artificial Sequence
  Synthetic
EVQLVESGGGLVQPGGSLKLSCAASGFTFNKYAMNWVRQAPGKGLEWVARIRSKYNNYATYYADSVKDRFTISRDDSKNTAYLQMNNLKTEDTAVYYCVRHGNFGNSYISYWAYWGQGTLVTVSSGGGGSGGGGSGGGGSQTVVTQEPSLTVSPGGTVTLTCGSSTGAVTSGYYPNWVQQKPGQAPRGLIGGTKFLAPGTPARFSGSLLGGKAALTLSGVQPEDEAEYYCALWYSNRWVFGGGTKLTVL

SEQ ID NO: 103 - protein, 249 aa, Artificial Sequence
  Synthetic
EVQLVESGGGLEQPGGSLKLSCAASGFTFNSYAMNWVRQAPGKGLEWVARIRSKYNNYATYYADSVKGRFTISRDDSKNTAYLQMNNLKTEDTAVYYCVRHGNFGNSYLSFWAYWGQGTLVTVSSGGGGSGGGGSGGGGSQTVVTQEPSLTVSPGGTVTLTCGSSTGAVTSGYYPNWVQQKPGQAPRGLIGGTKFLAPGTPARFSGSLLGGKAALTLSGVQPEDEAEYYCALWYSNRWVFGGGTKLTVL

SEQ ID NO: 104 - protein, 249 aa, Artificial Sequence
  Synthetic
EVQLVESGGGLVQPGGSLKLSCAASGFTFNRYAMNWVRQAPGKGLEWVARIRSKYNNYATYYADSVKGRFTISRDDSKNTAYLQMNNLKTEDTAVYYCVRHGNFGNSYLSYFAYWGQGTLVTVSSGGGGSGGGGSGGGGSQTVVTQEPSLTVSPGGTVTLTCGSSTGAVTSGYYPNWVQQKPGQAPRGLIGGTKFLAPGTPARFSGSLLGGKAALTLSGVQPEDEAEYYCALWYSNRWVFGGGTKLTVL

SEQ ID NO: 105 - protein, 249 aa, Artificial Sequence
  Synthetic
EVQLVESGGGLVQPGGSLKLSCAASGFTFNVYAMNWVRQAPGKGLEWVARIRSKYNNYATYYADSVKKRFTISRDDSKNTAYLQMNNLKTEDTAVYYCVRHGNFGNSYLSWWAYWGQGTLVTVSSGGGGSGGGGSGGGGSQTVVTQEPSLTVSPGGTVTLTCRSSTGAVTSGYYPNWVQQKPGQAPRGLIGATDMRPSGTPARFSGSLLGGKAALTLSGVQPEDEAEYYCALWYSNRWVFGGGTKLTVL

SEQ ID NO: 106 - protein, 249 aa, Artificial Sequence
  Synthetic
EVQLVESGGGLVQPGGSLKLSCAASGFTFNKYAMNWVRQAPGKGLEWVARIRSKYNNYATYYADSVKSRFTISRDDSKNTAYLQMNNLKTEDTAVYYCVRHGNFGNSYTSYYAYWGQGTLVTVSSGGGGSGGGGSGGGGSQTVVTQEPSLTVSPGGTVTLTCGSSTGAVTSGYYPNWVQQKPGQAPRGLIGGTKFLAPGTPARFSGSLLGGKAALTLSGVQPEDEAEYYCALWYSNRWVFGGGTKLTVL

SEQ ID NO: 107 - protein, 249 aa, Artificial Sequence
  Synthetic
EVQLVESGGGLVQPGGSLKLSCAASGFTFNGYAMNWVRQAPGKGLEWVARIRSKYNNYATYYADSVKERFTISRDDSKNTAYLQMNNLKTEDTAVYYCVRHRNFGNSYLSWFAYWGQGTLVTVSSGGGGSGGGGSGGGGSQTVVTQEPSLTVSPGGTVTLTCRSSTGAVTSGYYPNWVQQKPGQAPRGLIGATDMRPSGTPARFSGSLLGGKAALTLSGVQPEDEAEYYCALWYSNRWVFGGGTKLTVL

SEQ ID NO: 108 - protein, 249 aa, Artificial Sequence
  Synthetic
EVQLVESGGGLVQPGGSLKLSCAASGFTFNVYAMNWVRQAPGKGLEWVARIRSKYNNYATYYADSVKKRFTISRDDSKNTAYLQMNNLKTEDTAVYYCVRHGNFGNSYISWWAYWGQGTLVTVSSGGGGSGGGGSGGGGSQTVVTQEPSLTVSPGGTVTLTCGSSTGAVTSGYYPNWVQQKPGQAPRGLIGGTKFLAPGTPARFSGSLLGGKAALTLSGVQPEDEAEYYCALWYSNRWVFGGGTKLTVL

SEQ ID NO: 109 - protein, 249 aa, Artificial Sequence
  Synthetic
EVQLVESGGGLVQPGGSLKLSCAASGFTFNSYAMNWVRQAPGKGLEWVARIRSKYNNYATYYADSVKGRFTISRDDSKNTAYLQMNNLKTEDTAVYYCVRHGNFGNSYVSWWAYWGQGTLVTVSSGGGGSGGGGSGGGGSQTVVTQEPSLTVSPGGTVTLTCGSSTGAVTSGNYPNWVQQKPGQAPRGLIGGTKFLAPGTPARFSGSLLGGKAALTLSGVQPEDEAEYYCVLWYSNRWVFGGGTKLTVL

SEQ ID NO: 110 - protein, 249 aa, Artificial Sequence
  Synthetic
EVQLVESGGGLVQPGGSLKLSCAASGFTFNKYAMNWVRQAPGKGLEWVARIRSKYNNYATYYADSVKDRFTISRDDSKNTAYLQMNNLKTEDTAVYYCVRHGNFGNSYISYWAYWGQGTLVTVSSGGGGSGGGGSGGGGSQTVVTQEPSLTVSPGGTVTLTCGSSTGAVTSGNYPNWVQQKPGQAPRGLIGGTKFLAPGTPARFSGSLLGGKAALTLSGVQPEDEAEYYCVLWYSNRWVFGGGTKLTVL

SEQ ID NO: 111 - protein, 249 aa, Artificial Sequence
  Synthetic
EVQLVESGGGLVQPGGSLRLSCAASGFTFNSYAMNWVRQAPGKGLEWVARIRSKYNNYATYYADSVKGRFTISRDDSKNTAYLQMNSLKTEDTAVYYCVRHGNFGNSYVSWWAYWGQGTLVTVSSGGGGSGGGGSGGGGSQTVVTQEPSLTVSPGGTVTLTCGSSTGAVTSGNYPNWVQQKPGQAPRGLIGGTKFLAPGTPARFSGSLLGGKAALTLSGVQPEDEAEYYCVLWYSNRWVFGGGTKLTVL

SEQ ID NO: 112 - protein, 249 aa, Artificial Sequence
  Synthetic
EVQLLESGGGLVQPGGSLKLSCAASGFTFNIYAMNWVRQAPGKGLEWVARIRSKYNNYATYYADSVKSRFTISRDDSKNTAYLQMNNLKTEDTAVYYCVRHGNFGNSYVSFFAYWGQGTLVTVSSGGGGSGGGGSGGGGSELVVTQEPSLTVSPGGTVTLTCGSSTGAVTSGYYPNWVQQKPGQAPRGLIGGTKFLAPGTPARFSGSLLGGKAALTLSGVQPEDEAEYYCALWYSNRWVFGGGTKLTVL

SEQ ID NO: 113 - protein, 249 aa, Artificial Sequence
  Synthetic
EVQLLESGGGLVQPGGSLKLSCAASGFTFNKYAMNWVRQAPGKGLEWVARIRSKYNNYATYYADSVKDRFTISRDDSKNTAYLQMNNLKTEDTAVYYCVRHGNFGNSYISYWAYWGQGTLVTVSSGGGGSGGGGSGGGGSELVVTQEPSLTVSPGGTVTLTCGSSTGAVTSGYYPNWVQQKPGQAPRGLIGGTKFLAPGTPARFSGSLLGGKAALTLSGVQPEDEAEYYCALWYSNRWVFGGGTKLTVL

SEQ ID NO: 114 - protein, 249 aa, Artificial Sequence
  Synthetic
EVQLLESGGGLEQPGGSLKLSCAASGFTFNSYAMNWVRQAPGKGLEWVARIRSKYNNYATYYADSVKGRFTISRDDSKNTAYLQMNNLKTEDTAVYYCVRHGNFGNSYLSFWAYWGQGTLVTVSSGGGGSGGGGSGGGGSELVVTQEPSLTVSPGGTVTLTCGSSTGAVTSGYYPNWVQQKPGQAPRGLIGGTKFLAPGTPARFSGSLLGGKAALTLSGVQPEDEAEYYCALWYSNRWVFGGGTKLTVL

SEQ ID NO: 115 - protein, 249 aa, Artificial Sequence
  Synthetic
EVQLLESGGGLVQPGGSLKLSCAASGFTFNRYAMNWVRQAPGKGLEWVARIRSKYNNYATYYADSVKGRFTISRDDSKNTAYLQMNNLKTEDTAVYYCVRHGNFGNSYLSYFAYWGQGTLVTVSSGGGGSGGGGSGGGGSELVVTQEPSLTVSPGGTVTLTCGSSTGAVTSGYYPNWVQQKPGQAPRGLIGGTKFLAPGTPARFSGSLLGGKAALTLSGVQPEDEAEYYCALWYSNRWVFGGGTKLTVL

SEQ ID NO: 116 - protein, 249 aa, Artificial Sequence
  Synthetic
EVQLLESGGGLVQPGGSLKLSCAASGFTFNVYAMNWVRQAPGKGLEWVARIRSKYNNYATYYADSVKKRFTISRDDSKNTAYLQMNNLKTEDTAVYYCVRHGNFGNSYLSWWAYWGQGTLVTVSSGGGGSGGGGSGGGGSELVVTQEPSLTVSPGGTVTLTCRSSTGAVTSGYYPNWVQQKPGQAPRGLIGATDMRPSGTPARFSGSLLGGKAALTLSGVQPEDEAEYYCALWYSNRWVFGGGTKLTVL

SEQ ID NO: 117 - protein, 249 aa, Artificial Sequence
  Synthetic
EVQLLESGGGLVQPGGSLKLSCAASGFTFNKYAMNWVRQAPGKGLEWVARIRSKYNNYATYYADSVKSRFTISRDDSKNTAYLQMNNLKTEDTAVYYCVRHGNFGNSYTSYYAYWGQGTLVTVSSGGGGSGGGGSGGGGSELVVTQEPSLTVSPGGTVTLTCGSSTGAVTSGYYPNWVQQKPGQAPRGLIGGTKFLAPGTPARFSGSLLGGKAALTLSGVQPEDEAEYYCALWYSNRWVFGGGTKLTVL

SEQ ID NO: 118 - protein, 249 aa, Artificial Sequence
  Synthetic
EVQLLESGGGLVQPGGSLKLSCAASGFTFNGYAMNWVRQAPGKGLEWVARIRSKYNNYATYYADSVKERFTISRDDSKNTAYLQMNNLKTEDTAVYYCVRHRNFGNSYLSWFAYWGQGTLVTVSSGGGGSGGGGSGGGGSELVVTQEPSLTVSPGGTVTLTCRSSTGAVTSGYYPNWVQQKPGQAPRGLIGATDMRPSGTPARFSGSLLGGKAALTLSGVQPEDEAEYYCALWYSNRWVFGGGTKLTVL

SEQ ID NO: 119 - protein, 249 aa, Artificial Sequence
  Synthetic
EVQLLESGGGLVQPGGSLKLSCAASGFTFNVYAMNWVRQAPGKGLEWVARIRSKYNNYATYYADSVKKRFTISRDDSKNTAYLQMNNLKTEDTAVYYCVRHGNFGNSYISWWAYWGQGTLVTVSSGGGGSGGGGSGGGGSELVVTQEPSLTVSPGGTVTLTCGSSTGAVTSGYYPNWVQQKPGQAPRGLIGGTKFLAPGTPARFSGSLLGGKAALTLSGVQPEDEAEYYCALWYSNRWVFGGGTKLTVL

SEQ ID NO: 120 - protein, 249 aa, Artificial Sequence
  Synthetic
EVQLLESGGGLVQPGGSLKLSCAASGFTFNSYAMNWVRQAPGKGLEWVARIRSKYNNYATYYADSVKGRFTISRDDSKNTAYLQMNNLKTEDTAVYYCVRHGNFGNSYVSWWAYWGQGTLVTVSSGGGGSGGGGSGGGGSELVVTQEPSLTVSPGGTVTLTCGSSTGAVTSGNYPNWVQQKPGQAPRGLIGGTKFLAPGTPARFSGSLLGGKAALTLSGVQPEDEAEYYCVLWYSNRWVFGGGTKLTVL

SEQ ID NO: 121 - protein, 249 aa, Artificial Sequence
  Synthetic
EVQLLESGGGLVQPGGSLKLSCAASGFTFNKYAMNWVRQAPGKGLEWVARIRSKYNNYATYYADSVKDRFTISRDDSKNTAYLQMNNLKTEDTAVYYCVRHGNFGNSYISYWAYWGQGTLVTVSSGGGGSGGGGSGGGGSELVVTQEPSLTVSPGGTVTLTCGSSTGAVTSGNYPNWVQQKPGQAPRGLIGGTKFLAPGTPARFSGSLLGGKAALTLSGVQPEDEAEYYCVLWYSNRWVFGGGTKLTVL

SEQ ID NO: 122 - protein, 5 aa, Artificial Sequence
  Synthetic
NYGMH

SEQ ID NO: 123 - protein, 17 aa, Artificial Sequence
  Synthetic
LIWYDGSKKYYADSVKG

SEQ ID NO: 124 - protein, 16 aa, Artificial Sequence
  Synthetic
DPSSLTGSTGYYGMDV

SEQ ID NO: 125 - protein, 11 aa, Artificial Sequence
  Synthetic
SGDKLGDKYAC

SEQ ID NO: 126 - protein, 7 aa, Artificial Sequence
  Synthetic
QDRKRPS

SEQ ID NO: 127 - protein, 9 aa, Artificial Sequence
  Synthetic
QAWDSSTEV

SEQ ID NO: 128 - protein, 231 aa, Artificial Sequence
  Synthetic
MAWALLLLTLLTQGTGSWASYELTQPPSVSVSPGQTASITCSGDKLGDKYACWYQQKPGQSPVLVIYQDRKRPSGIPERFSGSNSGNTATLTISGTQAMDEADYYCQAWDSSTEVFGGGTKLTVLGQPKAAPSVTLFPPSSEELQANKATLVCLISDFYPGAVTVAWKADSSPVKAGVETTTPSKQSNNKYAASSYLSLTPEQWKSHRSYSCQVTHEGSTVEKTVAPTECS

SEQ ID NO: 129 - protein, 5 aa, Artificial Sequence
  Synthetic
SYDMS

SEQ ID NO: 130 - protein, 17 aa, Artificial Sequence
  Synthetic
LISGGGSNTYYADSVKG

SEQ ID NO: 131 - protein, 11 aa, Artificial Sequence
  Synthetic
PSGHYFYAMDV

SEQ ID NO: 132 - protein, 11 aa, Artificial Sequence
  Synthetic
RASQGISNWLA

SEQ ID NO: 133 - protein, 7 aa, Artificial Sequence
  Synthetic
AASSLQS

SEQ ID NO: 134 - protein, 5 aa, Artificial Sequence
  Synthetic
DYSMS

SEQ ID NO: 135 - protein, 17 aa, Artificial Sequence
  Synthetic
GINWNGGRTRYADSVKG

SEQ ID NO: 136 - protein, 12 aa, Artificial Sequence
  Synthetic
EFNNFESNWFDP

SEQ ID NO: 137 - protein, 11 aa, Artificial Sequence
  Synthetic
SGDALPKKYAY

SEQ ID NO: 138 - protein, 7 aa, Artificial Sequence
  Synthetic
EDSKRPS

SEQ ID NO: 139 - protein, 11 aa, Artificial Sequence
  Synthetic
YSTDSSGNHRV

SEQ ID NO: 140 - protein, 5 aa, Artificial Sequence
  Synthetic
SYDMS

SEQ ID NO: 141 - protein, 17 aa, Artificial Sequence
  Synthetic
LISGGGSNTYYAESVKG

SEQ ID NO: 142 - protein, 11 aa, Artificial Sequence
  Synthetic
PSGHYFYAMDV

SEQ ID NO: 143 - protein, 11 aa, Artificial Sequence
  Synthetic
RASQGISNWLA

SEQ ID NO: 144 - protein, 7 aa, Artificial Sequence
  Synthetic
AASSLQS

SEQ ID NO: 145 - protein, 9 aa, Artificial Sequence
  Synthetic
QQAESFPHT

SEQ ID NO: 146 - protein, 5 aa, Artificial Sequence
  Synthetic
SYDMS

SEQ ID NO: 147 - protein, 17 aa, Artificial Sequence
  Synthetic
LISGGGSQTYYAESVKG

SEQ ID NO: 148 - protein, 11 aa, Artificial Sequence
  Synthetic
PSGHYFYAMDV

SEQ ID NO: 149 - protein, 11 aa, Artificial Sequence
  Synthetic
RASQGISNWLA

SEQ ID NO: 150 - protein, 7 aa, Artificial Sequence
  Synthetic
AASSLQS

SEQ ID NO: 151 - protein, 9 aa, Artificial Sequence
  Synthetic
QQAESFPHT

SEQ ID NO: 152 - protein, 5 aa, Artificial Sequence
  Synthetic
NYGMH

SEQ ID NO: 153 - protein, 17 aa, Artificial Sequence
  Synthetic
LIWYDASKKYYAESVKG

SEQ ID NO: 154 - protein, 16 aa, Artificial Sequence
  Synthetic
DPSSLTGSTGYYGMDV

SEQ ID NO: 155 - protein, 11 aa, Artificial Sequence
  Synthetic
SGDKLGDKYAS

SEQ ID NO: 156 - protein, 7 aa, Artificial Sequence
  Synthetic
QDRKRPS

SEQ ID NO: 157 - protein, 9 aa, Artificial Sequence
  Synthetic
QAFESSTEV

SEQ ID NO: 158 - protein, 5 aa, Artificial Sequence
  Synthetic
DYSMS

SEQ ID NO: 159 - protein, 17 aa, Artificial Sequence
  Synthetic
GINWNGGRTRYADAVKG

SEQ ID NO: 160 - protein, 12 aa, Artificial Sequence
  Synthetic
EFNNFESNWFDP

SEQ ID NO: 161 - protein, 11 aa, Artificial Sequence
  Synthetic
SGDALPKKYAY

SEQ ID NO: 162 - protein, 7 aa, Artificial Sequence
  Synthetic
EDAKRPS

SEQ ID NO: 163 - protein, 11 aa, Artificial Sequence
  Synthetic
YSTDASGNHRV

SEQ ID NO: 164 - protein, 5 aa, Artificial Sequence
  Synthetic
DYSMS

SEQ ID NO: 165 - protein, 17 aa, Artificial Sequence
  Synthetic
GINWNAGRTRYADAVKG

SEQ ID NO: 166 - protein, 12 aa, Artificial Sequence
  Synthetic
EFNNFESNWFDP

SEQ ID NO: 167 - protein, 11 aa, Artificial Sequence
  Synthetic
SGDALPKKYAY

SEQ ID NO: 168 - protein, 7 aa, Artificial Sequence
  Synthetic
EDAKRPS

SEQ ID NO: 169 - protein, 11 aa, Artificial Sequence
  Synthetic
YSTDASGNHRV

SEQ ID NO: 170 - protein, 125 aa, Artificial Sequence
  Synthetic
QVQLVESGGGVVQPGRSLRLSCAASGFTFSNYGMHWVRQAPGKGLEWVALIWYDGSKKYYADSVKGRFTISRDNSKNTLYLQMNSLRAEDTAAYYCARDPSSLTGSTGYYGMDVWGQGTTVTVSS

SEQ ID NO: 171 - protein, 106 aa, Artificial Sequence
  Synthetic
SYELTQPPSVSVSPGQTASITCSGDKLGDKYACWYQQKPGQSPVLVIYQDRKRPSGIPERFSGSNSGNTATLTISGTQAMDEADYYCQAWDSSTEVFGGGTKLTVL

SEQ ID NO: 172 - protein, 120 aa, Artificial Sequence
  Synthetic
EVQLLESGGGLVQPGGALRLSCAASGFTFSSYDMSWVRQAPGKGLEWVSLISGGGSNTYYADSVKGRFTISRDNSKNTLYLQMNSLRAEDTAVYFCASPSGHYFYAMDVWGQGTTVTVSS

SEQ ID NO: 173 - protein, 107 aa, Artificial Sequence
  Synthetic
DIQMTQSPSSVSASVGDRVTITCRASQGISNWLAWYQQKPGKAPKLLIFAASSLQSGVPSRFGGSGSGTDFTFTISSLQPEDFATYYCQQADSFPHTFGGGTKVEIK

SEQ ID NO: 174 - protein, 121 aa, Artificial Sequence
  Synthetic
EVQLVESGGSVVRPGGSLRLSCAASGFTVDDYSMSWVRQVPGKGLEWVSGINWNGGRTRYADSVKGRFTISRDSAKNSLYLQMNSLRAEDTALYYCAREFNNFESNWFDPWGQGTLVTVSS

SEQ ID NO: 175 - protein, 108 aa, Artificial Sequence
  Synthetic
SYELTQPPSVSVSPGQTARITCSGDALPKKYAYWYQQKSGQAPVLVISEDSKRPSGIPERFSGSSSGTMATLTISGAQVEDEADYYCYSTDSSGNHRVFGGGTKLTVL

SEQ ID NO: 176 - protein, 120 aa, Artificial Sequence
  Synthetic
EVQLLESGGGLVQPGGSLRLSCAASGFTFSSYDMSWVRQAPGKGLEWVSLISGGGSNTYYAESVKGRFTISRDNSKNTLYLQMNSLRAEDTAVYFCASPSGHYFYAMDVWGQGTTVTVSS

SEQ ID NO: 177 - protein, 107 aa, Artificial Sequence
  Synthetic
DIQMTQSPSSVSASVGDRVTITCRASQGISNWLAWYQQKPGKAPKLLIFAASSLQSGVPSRFSGSGSGTDFTLTISSLQPEDFATYYCQQAESFPHTFGGGTKVEIK

SEQ ID NO: 178 - protein, 120 aa, Artificial Sequence
  Synthetic
EVQLLESGGGLVQPGGSLRLSCAASGFTFSSYDMSWVRQAPGKGLEWVSLISGGGSQTYYAESVKGRFTISRDNSKNTLYLQMNSLRAEDTAVYFCASPSGHYFYAMDVWGQGTTVTVSS

SEQ ID NO: 179 - protein, 107 aa, Artificial Sequence; identical to SEQ ID NO: 177
  Synthetic

SEQ ID NO: 180 - protein, 125 aa, Artificial Sequence
  Synthetic
QVQLVESGGGVVQPGRSLRLSCAASGFTFSNYGMHWVRQAPGKGLEWVALIWYDASKKYYAESVKGRFTISRDNSKNTLYLQMNSLRAEDTAAYYCARDPSSLTGSTGYYGMDVWGQGTTVTVSS

SEQ ID NO: 181 - protein, 106 aa, Artificial Sequence
  Synthetic
SYELTQPPSVSVSPGQTASITCSGDKLGDKYASWYQQKPGQSPVLVIYQDRKRPSGIPERFSGSNSGNTATLTISGTQAMDEADYYCQAFESSTEVFGGGTKLTVL

SEQ ID NO: 182 - protein, 121 aa, Artificial Sequence
  Synthetic
EVQLVESGGSVVRPGGSLRLSCAASGFTVDDYSMSWVRQVPGKGLEWVSGINWNGGRTRYADAVKGRFTISRDSAKNSLYLQMNSLRAEDTALYYCAREFNNFESNWFDPWGQGTLVTVSS

SEQ ID NO: 183 - protein, 108 aa, Artificial Sequence
  Synthetic
SYELTQPPSVSVSPGQTARITCSGDALPKKYAYWYQQKPGQAPVLVISEDAKRPSGIPERFSGSSSGTMATLTISGAQVEDEADYYCYSTDASGNHRVFGGGTKLTVL

SEQ ID NO: 184 - protein, 121 aa, Artificial Sequence
  Synthetic
EVQLVESGGSVVRPGGSLRLSCAASGFTVDDYSMSWVRQVPGKGLEWVSGINWNAGRTRYADAVKGRFTISRDSAKNSLYLQMNSLRAEDTALYYCAREFNNFESNWFDPWGQGTLVTVSS

SEQ ID NO: 185 - protein, 108 aa, Artificial Sequence; identical to SEQ ID NO: 183
  Synthetic

SEQ ID NO: 186 - protein, 477 aa, Artificial Sequence
  Synthetic
MDMRVPAQLLGLLLLWLRGARCQVQLVESGGGVVQPGRSLRLSCAASGFTFSNYGMHWVRQAPGKGLEWVALIWYDGSKKYYADSVKGRFTISRDNSKNTLYLQMNSLRAEDTAAYYCARDPSSLTGSTGYYGMDVWGQGTTVTVSSASTKGPSVFPLAPSSKSTSGGTAALGCLVKDYFPEPVTVSWNSGALTSGVHTFPAVLQSSGLYSLSSVVTVPSSSLGTQTYICNVNHKPSNTKVDKKVEPKSCDKTHTCPPCPAPELLGGPSVFLFPPKPKDTLMISRTPEVTCVVVDVSHEDPEVKFNWYVDGVEVHNAKTKPCEEQYGSTYRCVSVLTVLHQDWLNGKEYKCKVSNKALPAPIEKTISKAKGQPREPQVYTLPPSREEMTKNQVSLTCLVKGFYPSDIAVEWESNGQPENNYKTTPPVLDSDGSFFLYSKLTVDKSRWQQGNVFSCSVMHEALHNHYTQKSLSLSPGK

SEQ ID NO: 187 - protein, 231 aa, Artificial Sequence; identical to SEQ ID NO: 128
  Synthetic

SEQ ID NO: 188 - protein, 472 aa, Artificial Sequence
  Synthetic
MDMRVPAQLLGLLLLWLRGARCEVQLLESGGGLVQPGGALRLSCAASGFTFSSYDMSWVRQAPGKGLEWVSLISGGGSNTYYADSVKGRFTISRDNSKNTLYLQMNSLRAEDTAVYFCASPSGHYFYAMDVWGQGTTVTVSSASTKGPSVFPLAPSSKSTSGGTAALGCLVKDYFPEPVTVSWNSGALTSGVHTFPAVLQSSGLYSLSSVVTVPSSSLGTQTYICNVNHKPSNTKVDKKVEPKSCDKTHTCPPCPAPELLGGPSVFLFPPKPKDTLMISRTPEVTCVVVDVSHEDPEVKFNWYVDGVEVHNAKTKPCEEQYGSTYRCVSVLTVLHQDWLNGKEYKCKVSNKALPAPIEKTISKAKGQPREPQVYTLPPSREEMTKNQVSLTCLVKGFYPSDIAVEWESNGQPENNYKTTPPVLDSDGSFFLYSKLTVDKSRWQQGNVFSCSVMHEALHNHYTQKSLSLSPGK

SEQ ID NO: 189 - protein, 236 aa, Artificial Sequence
  Synthetic
MDMRVPAQLLGLLLLWLRGARCDIQMTQSPSSVSASVGDRVTITCRASQGISNWLAWYQQKPGKAPKLLIFAASSLQSGVPSRFGGSGSGTDFTFTISSLQPEDFATYYCQQADSFPHTFGGGTKVEIKRTVAAPSVFIFPPSDEQLKSGTASVVCLLNNFYPREAKVQWKVDNALQSGNSQESVTEQDSKDSTYSLSSTLTLSKADYEKHKVYACEVTHQGLSSPVTKSFNRGEC

SEQ ID NO: 190 - protein, 473 aa, Artificial Sequence
  Synthetic
MDMRVPAQLLGLLLLWLRGARCEVQLVESGGSVVRPGGSLRLSCAASGFTVDDYSMSWVRQVPGKGLEWVSGINWNGGRTRYADSVKGRFTISRDSAKNSLYLQMNSLRAEDTALYYCAREFNNFESNWFDPWGQGTLVTVSSASTKGPSVFPLAPSSKSTSGGTAALGCLVKDYFPEPVTVSWNSGALTSGVHTFPAVLQSSGLYSLSSVVTVPSSSLGTQTYICNVNHKPSNTKVDKKVEPKSCDKTHTCPPCPAPELLGGPSVFLFPPKPKDTLMISRTPEVTCVVVDVSHEDPEVKFNWYVDGVEVHNAKTKPCEEQYGSTYRCVSVLTVLHQDWLNGKEYKCKVSNKALPAPIEKTISKAKGQPREPQVYTLPPSREEMTKNQVSLTCLVKGFYPSDIAVEWESNGQPENNYKTTPPVLDSDGSFFLYSKLTVDKSRWQQGNVFSCSVMHEALHNHYTQKSLSLSPGK

SEQ ID NO: 191 - protein, 233 aa, Artificial Sequence
  Synthetic
MAWALLLLTLLTQGTGSWASYELTQPPSVSVSPGQTARITCSGDALPKKYAYWYQQKSGQAPVLVISEDSKRPSGIPERFSGSSSGTMATLTISGAQVEDEADYYCYSTDSSGNHRVFGGGTKLTVLGQPKAAPSVTLFPPSSEELQANKATLVCLISDFYPGAVTVAWKADSSPVKAGVETTTPSKQSNNKYAASSYLSLTPEQWKSHRSYSCQVTHEGSTVEKTVAPTECS

SEQ ID NO: 192 - protein, 472 aa, Artificial Sequence
  Synthetic
MDMRVPAQLLGLLLLWLRGARCEVQLLESGGGLVQPGGSLRLSCAASGFTFSSYDMSWVRQAPGKGLEWVSLISGGGSNTYYAESVKGRFTISRDNSKNTLYLQMNSLRAEDTAVYFCASPSGHYFYAMDVWGQGTTVTVSSASTKGPSVFPLAPSSKSTSGGTAALGCLVKDYFPEPVTVSWNSGALTSGVHTFPAVLQSSGLYSLSSVVTVPSSSLGTQTYICNVNHKPSNTKVDKKVEPKSCDKTHTCPPCPAPELLGGPSVFLFPPKPKDTLMISRTPEVTCVVVDVSHEDPEVKFNWYVDGVEVHNAKTKPCEEQYGSTYRCVSVLTVLHQDWLNGKEYKCKVSNKALPAPIEKTISKAKGQPREPQVYTLPPSREEMTKNQVSLTCLVKGFYPSDIAVEWESNGQPENNYKTTPPVLDSDGSFFLYSKLTVDKSRWQQGNVFSCSVMHEALHNHYTQKSLSLSPGK

SEQ ID NO: 193 - protein, 236 aa, Artificial Sequence
  Synthetic
MDMRVPAQLLGLLLLWLRGARCDIQMTQSPSSVSASVGDRVTITCRASQGISNWLAWYQQKPGKAPKLLIFAASSLQSGVPSRFSGSGSGTDFTLTISSLQPEDFATYYCQQAESFPHTFGGGTKVEIKRTVAAPSVFIFPPSDEQLKSGTASVVCLLNNFYPREAKVQWKVDNALQSGNSQESVTEQDSKDSTYSLSSTLTLSKADYEKHKVYACEVTHQGLSSPVTKSFNRGEC

SEQ ID NO: 194 - protein, 472 aa, Artificial Sequence
  Synthetic
MDMRVPAQLLGLLLLWLRGARCEVQLLESGGGLVQPGGSLRLSCAASGFTFSSYDMSWVRQAPGKGLEWVSLISGGGSQTYYAESVKGRFTISRDNSKNTLYLQMNSLRAEDTAVYFCASPSGHYFYAMDVWGQGTTVTVSSASTKGPSVFPLAPSSKSTSGGTAALGCLVKDYFPEPVTVSWNSGALTSGVHTFPAVLQSSGLYSLSSVVTVPSSSLGTQTYICNVNHKPSNTKVDKKVEPKSCDKTHTCPPCPAPELLGGPSVFLFPPKPKDTLMISRTPEVTCVVVDVSHEDPEVKFNWYVDGVEVHNAKTKPCEEQYGSTYRCVSVLTVLHQDWLNGKEYKCKVSNKALPAPIEKTISKAKGQPREPQVYTLPPSREEMTKNQVSLTCLVKGFYPSDIAVEWESNGQPENNYKTTPPVLDSDGSFFLYSKLTVDKSRWQQGNVFSCSVMHEALHNHYTQKSLSLSPGK

SEQ ID NO: 195 - protein, 236 aa, Artificial Sequence; identical to SEQ ID NO: 193
  Synthetic

SEQ ID NO: 196 - protein, 477 aa, Artificial Sequence
  Synthetic
MDMRVPAQLLGLLLLWLRGARCQVQLVESGGGVVQPGRSLRLSCAASGFTFSNYGMHWVRQAPGKGLEWVALIWYDASKKYYAESVKGRFTISRDNSKNTLYLQMNSLRAEDTAAYYCARDPSSLTGSTGYYGMDVWGQGTTVTVSSASTKGPSVFPLAPSSKSTSGGTAALGCLVKDYFPEPVTVSWNSGALTSGVHTFPAVLQSSGLYSLSSVVTVPSSSLGTQTYICNVNHKPSNTKVDKKVEPKSCDKTHTCPPCPAPELLGGPSVFLFPPKPKDTLMISRTPEVTCVVVDVSHEDPEVKFNWYVDGVEVHNAKTKPCEEQYGSTYRCVSVLTVLHQDWLNGKEYKCKVSNKALPAPIEKTISKAKGQPREPQVYTLPPSREEMTKNQVSLTCLVKGFYPSDIAVEWESNGQPENNYKTTPPVLDSDGSFFLYSKLTVDKSRWQQGNVFSCSVMHEALHNHYTQKSLSLSPGK

SEQ ID NO: 197 - protein, 231 aa, Artificial Sequence
  Synthetic
MAWALLLLTLLTQGTGSWASYELTQPPSVSVSPGQTASITCSGDKLGDKYASWYQQKPGQSPVLVIYQDRKRPSGIPERFSGSNSGNTATLTISGTQAMDEADYYCQAFESSTEVFGGGTKLTVLGQPKAAPSVTLFPPSSEELQANKATLVCLISDFYPGAVTVAWKADSSPVKAGVETTTPSKQSNNKYAASSYLSLTPEQWKSHRSYSCQVTHEGSTVEKTVAPTECS

SEQ ID NO: 198 - protein, 473 aa, Artificial Sequence
  Synthetic
MDMRVPAQLLGLLLLWLRGARCEVQLVESGGSVVRPGGSLRLSCAASGFTVDDYSMSWVRQVPGKGLEWVSGINWNGGRTRYADAVKGRFTISRDSAKNSLYLQMNSLRAEDTALYYCAREFNNFESNWFDPWGQGTLVTVSSASTKGPSVFPLAPSSKSTSGGTAALGCLVKDYFPEPVTVSWNSGALTSGVHTFPAVLQSSGLYSLSSVVTVPSSSLGTQTYICNVNHKPSNTKVDKKVEPKSCDKTHTCPPCPAPELLGGPSVFLFPPKPKDTLMISRTPEVTCVVVDVSHEDPEVKFNWYVDGVEVHNAKTKPCEEQYGSTYRCVSVLTVLHQDWLNGKEYKCKVSNKALPAPIEKTISKAKGQPREPQVYTLPPSREEMTKNQVSLTCLVKGFYPSDIAVEWESNGQPENNYKTTPPVLDSDGSFFLYSKLTVDKSRWQQGNVFSCSVMHEALHNHYTQKSLSLSPGK

SEQ ID NO: 199 - protein, 233 aa, Artificial Sequence
  Synthetic
MAWALLLLTLLTQGTGSWASYELTQPPSVSVSPGQTARITCSGDALPKKYAYWYQQKPGQAPVLVISEDAKRPSGIPERFSGSSSGTMATLTISGAQVEDEADYYCYSTDASGNHRVFGGGTKLTVLGQPKAAPSVTLFPPSSEELQANKATLVCLISDFYPGAVTVAWKADSSPVKAGVETTTPSKQSNNKYAASSYLSLTPEQWKSHRSYSCQVTHEGSTVEKTVAPTECS

SEQ ID NO: 200 - protein, 473 aa, Artificial Sequence
  Synthetic
MDMRVPAQLLGLLLLWLRGARCEVQLVESGGSVVRPGGSLRLSCAASGFTVDDYSMSWVRQVPGKGLEWVSGINWNAGRTRYADAVKGRFTISRDSAKNSLYLQMNSLRAEDTALYYCAREFNNFESNWFDPWGQGTLVTVSSASTKGPSVFPLAPSSKSTSGGTAALGCLVKDYFPEPVTVSWNSGALTSGVHTFPAVLQSSGLYSLSSVVTVPSSSLGTQTYICNVNHKPSNTKVDKKVEPKSCDKTHTCPPCPAPELLGGPSVFLFPPKPKDTLMISRTPEVTCVVVDVSHEDPEVKFNWYVDGVEVHNAKTKPCEEQYGSTYRCVSVLTVLHQDWLNGKEYKCKVSNKALPAPIEKTISKAKGQPREPQVYTLPPSREEMTKNQVSLTCLVKGFYPSDIAVEWESNGQPENNYKTTPPVLDSDGSFFLYSKLTVDKSRWQQGNVFSCSVMHEALHNHYTQKSLSLSPGK

SEQ ID NO: 201 - protein, 233 aa, Artificial Sequence; identical to SEQ ID NO: 199
  Synthetic

SEQ ID NO: 202 - protein, 4 aa, Artificial Sequence
  Synthetic
GGGG

SEQ ID NO: 203 - protein, 5 aa, Artificial Sequence
  Synthetic
GGGGS

SEQ ID NO: 204 - protein, 5 aa, Artificial Sequence
  Synthetic
GGGGQ

SEQ ID NO: 205 - protein, 6 aa, Artificial Sequence
  Synthetic
SGGGGS

SEQ ID NO: 206 - protein, 6 aa, Artificial Sequence
  Synthetic
PGGGGS

SEQ ID NO: 207 - protein, 6 aa, Artificial Sequence
  Synthetic
PGGDGS

SEQ ID NO: 208 - protein, 9 aa, Artificial Sequence
  Synthetic
GGGGSGGGS

SEQ ID NO: 209 - protein, 10 aa, Artificial Sequence
  Synthetic
GGGGSGGGGS

SEQ ID NO: 210 - protein, 15 aa, Artificial Sequence
  Synthetic
GGGGSGGGGSGGGGS

SEQ ID NO: 211 - protein, 20 aa, Artificial Sequence
  Synthetic
GGGGSGGGGSGGGGSGGGGS

SEQ ID NO: 212 - protein, 25 aa, Artificial Sequence
  Synthetic
GGGGSGGGGSGGGGSGGGGSGGGGS

SEQ ID NO: 213 - protein, 30 aa, Artificial Sequence
  Synthetic
GGGGSGGGGSGGGGSGGGGSGGGGSGGGGS

SEQ ID NO: 214 - protein, 35 aa, Artificial Sequence
  Synthetic
GGGGSGGGGSGGGGSGGGGSGGGGSGGGGSGGGGS

SEQ ID NO: 215 - protein, 40 aa, Artificial Sequence
  Synthetic
GGGGSGGGGSGGGGSGGGGSGGGGSGGGGSGGGGSGGGGS

SEQ ID NO: 216 - protein, 16 aa, Artificial Sequence
  Synthetic
RDWDFDVFGGGTPVGG

SEQ ID NO: 217 - protein, 16 aa, Artificial Sequence
  Synthetic
  misc_feature (12)..(12): Xaa can be any naturally occurring amino acid
QRFVTGHFGGLXPANG

SEQ ID NO: 218 - protein, 16 aa, Artificial Sequence
  Synthetic
QRFVTGHFGGLYPANG

SEQ ID NO: 219 - protein, 16 aa, Artificial Sequence
  Synthetic
QRFVTGHFGGLHPANG

SEQ ID NO: 220 - protein, 9 aa, Artificial Sequence
  Synthetic
TGHFGGLHP

SEQ ID NO: 221 - protein, 16 aa, Artificial Sequence
  Synthetic
QRFCTGHFGGLHPCNG

SEQ ID NO: 222 - protein, 585 aa, Homo Sapiens [sequence omitted]

SEQ ID NO: 223 - protein, 585 aa, Artificial Sequence
  Synthetic
DAHKSEVAHRFKDLGEENFKALVLIAFAQYLQQCPFEDHVKLVNEVTEFAKTCVADESAENCDKSLHTLFGDKLCTVATLRETYGEMADCCAKQEPERNECFLQHKDDNPNLPRLVRPEVDVMCTAFHDNEETFLKKYLYEIARRHPYFYAPELLFFAKRYKAAFTECCQAADKAACLLPKLDELRDEGKASSAKQRLKCASLQKFGERAFKAWAVARLSQRFPKAEFAEVSKLVTDLTKVHTECCHGDLLECADDRADLAKYICENQDSISSKLKECCEKPLLEKSHCIAEVENDEMPADLPSLAADFVESKDVCKNYAEAKDVFLGMFLYEYARRHPDYSVVLLLRLAKTYETTLEKCCAAADPHECYAKVFDEFKPLVEEPQNLIKQNCELFEQLGEYKFQNALLVRYTKKVPQVSTPTLVEVSRNLGKVGSKCCKHPEAKRMPCAEDYLSVVLNQLCVLHEKTPVSDRVTKCCTESLVNRRPCFSALEVDETYVPKEFNAGTFTFHADICTLSEKERQIKKQTALVELVKHKPKATKEQLKAAMDDFAAFVEKCCKADDKETCFAEEGKKLVAASQAALGL

SEQ ID NO: 224 - protein, 585 aa, Artificial Sequence
  Synthetic
DAHKSEVAHRFKDLGEENFKALVLIAFAQYLQQCPFEDHVKLVNEVTEFAKTCVADESAENCDKSLHTLFGDKLCTVATLRETYGEMADCCAKQEPERNECFLQHKDDNPNLPRLVRPEVDVMCTAFHDNEETFLKKYLYEIARRHPYFYAPELLFFAKRYKAAFTECCQAADKAACLLPKLDELRDEGKASSAKQRLKCASLQKFGERAFKAWAVARLSQRFPKAEFAEVSKLVTDLTKVHTECCHGDLLECADDRADLAKYICENQDSISSKLKECCEKPLLEKSHCIAEVENDEMPADLPSLAADFVESKDVCKNYAEAKDVFLGMFLYEYARRHPDYSVVLLLRLAKTYETTLEKCCAAADPHECYAKVFDEFKPLVEEPQNLIKQNCELFEQLGEYKFQNALLVRYTKKVPQVSTPTLVEVSRNLGKVGSKCCKHPEAKRMPCAEDYLSVVLNQLCVLHEKTPVSDRVTKCCTESLVNRRPCFSALEVDETYVPKEFNAETFTFHADICTLSEKERQIKKQTALVELVKHKPKATKEQLKAVMDDFAAFVEKCCKADDKETCFAEEGPKLVAASQAALGL

SEQ ID NO: 225 - protein, 585 aa, Artificial Sequence
  Synthetic
DAHKSEVAHRFKDLGEENFKALVLIAFAQYLQQCPFEDHVKLVNEVTEFAKTCVADESAENCDKSLHTLFGDKLCTVATLRETYGEMADCCAKQEPERNECFLQHKDDNPNLPRLVRPEVDVMCTAFHDNEETFLKKYLYEIARRHPYFYAPELLFFAKRYKAAFTECCQAADKAACLLPKLDELRDEGKASSAKQRLKCASLQKFGERAFKAWAVARLSQRFPKAEFAEVSKLVTDLTKVHTECCHGDLLECADDRADLAKYICENQDSISSKLKECCEKPLLEKSHCIAEVENDEMPADLPSLAADFVESKDVCKNYAEAKDVFLGMFLYEYARRHPDYSVVLLLRLAKTYETTLEKCCAAADPHECYAKVFDEFKPLVEEPQNLIKQNCELFEQLGEYKFQNALLVRYTKKVPQVSTPTLVEVSRNLGKVGSKCCKHPEAKRMPCAEDYLSVVLNQLCVLHEKTPVSDRVTKCCTESLVNRRPCFSALDVDETYVPKEFNAETFTFHADICTLSEKERQIKKQTALVELVKHKPKATKEQLKAVMDDFAAFVEKCCKADDKETCFAEEGPHLVAASKAALGL

SEQ ID NO: 226 - protein, 585 aa, Artificial Sequence
  Synthetic
DAHKSEVAHRFKDLGEENFKALVLIAFAQYLQQCPFEDHVKLVNEVTEFAKTCVADESAENCDKSLHTLFGDKLCTVATLRETYGEMADCCAKQEPERNECFLQHKDDNPNLPRLVRPEVDVMCTAFHDNEETFLKKYLYEIARRHPYFYAPELLFFAKRYKAAFTECCQAADKAACLLPKLDELRDEGKASSAKQRLKCASLQKFGERAFKAWAVARLSQRFPKAEFAEVSKLVTDLTKVHTECCHGDLLECADDRADLAKYICENQDSISSKLKECCEKPLLEKSHCIAEVENDEMPADLPSLAADFVESKDVCKNYAEAKDVFLGMFLYEYARRHPDYSVVLLLRLAKTYETTLEKCCAAADPHECYAKVFDEFKPLVEEPQNLIKQNCELFEQLGEYKFQNALLVRYTKKVPQVSTPTLVEVSRNLGKVGSKCCKHPEAKRMPCAEDYLSVVLNQLCVLHEKTPVSDRVTKCCTESLVNRRPCFSALGVDETYVPKEFNAETFTFHADICTLSEKERQIKKQTALVELVKHKPKATKEQLKAVMDKFAAFVEKCCKADDKETCFAEEGPKLVAASQAALGL

SEQ ID NO: 227 - protein, 585 aa, Artificial Sequence
  Synthetic
DAHKSEVAHRFKDLGEENFKALVLIAFAQYLQQCPFEDHVKLVNEVTEFAKTCVADESAENCDKSLHTLFGDKLCTVATLRETYGEMADCCAKQEPERNECFLQHKDDNPNLPRLVRPEVDVMCTAFHDNEETFLKKYLYEIARRHPYFYAPELLFFAKRYKAAFTECCQAADKAACLLPKLDELRDEGKASSAKQRLKCASLQKFGERAFKAWAVARLSQRFPKAEFAEVSKLVTDLTKVHTECCHGDLLECADDRADLAKYICENQDSISSKLKECCEKPLLEKSHCIAEVENDEMPADLPSLAADFVESKDVCKNYAEAKDVFLGMFLYEYARRHPDYSVVLLLRLAKTYETTLEKCCAAADPHECYAKVFDEFKPLVEEPQNLIKQNCELFEQLGEYKFQNALLVRYTKKVPQVSTPTLVEVSRNLGKVGSKCCKHPEAKRMPCAEDYLSVVLNQLCVLHEKTPVSDRVTKCCTESLVNRRPCFSALDVDETYVPKEFNAETFTFHADICTLSEKERQIKKQTALVELVKHKPKATKEQLKAVMDKFAAFVEKCCKADDKETCFAEEGPKLVAASQAALGL

SEQ ID NO: 228 - protein, 585 aa, Artificial Sequence
  Synthetic
DAHKSEVAHRFKDLGEENFKALVLIAFAQYLQQCPFEDHVKLVNEVTEFAKTCVADESAENCDKSLHTLFGDKLCTVATLRETYGEMADCCAKQEPERNECFLQHKDDNPNLPRLVRPEVDVMCTAFHDNEETFLKKYLYEIARRHPYFYAPELLFFAKRYKAAFTECCQAADKAACLLPKLDELRDEGKASSAKQRLKCASLQKFGERAFKAWAVARLSQRFPKAEFAEVSKLVTDLTKVHTECCHGDLLECADDRADLAKYICENQDSISSKLKECCEKPLLEKSHCIAEVENDEMPADLPSLAADFVESKDVCKNYAEAKDVFLGMFLYEYARRHPDYSVVLLLRLAKTYETTLEKCCAAADPHECYAKVFDEFKPLVEEPQNLIKQNCELFEQLGEYKFQNALLVRYTKKVPQVSTPTLVEVSRNLGKVGSKCCKHPEAKRMPCAEDYLSVVLNQLCVLHEKTPVSDRVTKCCTESLVNRRPCFSALEVDETYVPKEFNAETFTFHADICTLSEKERQIKKQTALVELVKHKPKATKEQLKAVMDKFAAFVEKCCKADDKETCFAEEGPHLVAASQAALGL

SEQ ID NO: 229 - protein, 585 aa, Artificial Sequence
  Synthetic
DAHKSEVAHRFKDLGEENFKALVLIAFAQYLQQCPFEDHVKLVNEVTEFAKTCVADESAENCDKSLHTLFGDKLCTVATLRETYGEMADCCAKQEPERNECFLQHKDDNPNLPRLVRPEVDVMCTAFHDNEETFLKKYLYEIARRHPYFYAPELLFFAKRYKAAFTECCQAADKAACLLPKLDELRDEGKASSAKQRLKCASLQKFGERAFKAWAVARLSQRFPKAEFAEVSKLVTDLTKVHTECCHGDLLECADDRADLAKYICENQDSISSKLKECCEKPLLEKSHCIAEVENDEMPADLPSLAADFVESKDVCKNYAEAKDVFLGMFLYEYARRHPDYSVVLLLRLAKTYETTLEKCCAAADPHECYAKVFDEFKPLVEEPQNLIKQNCELFEQLGEYKFQNALLVRYTKKVPQVSTPTLVEVSRNLGKVGSKCCKHPEAKRMPCAEDYLSVVLNQLCVLHEKTPVSDRVTKCCTESLVNRRPCFSALEVDETYVPKEFNAETFTFHADICTLSEKERQIKKQTALVELVKHKPKATKEQLKAVMDDFAAFVEKCCKADDKETCFAEEGPHLVAASKAALGL

SEQ ID NO: 230 - protein, 585 aa, Artificial Sequence
  Synthetic
DAHKSEVAHRFKDLGEENFKALVLIAFAQYLQQCPFEDHVKLVNEVTEFAKTCVADESAENCDKSLHTLFGDKLCTVATLRETYGEMADCCAKQEPERNECFLQHKDDNPNLPRLVRPEVDVMCTAFHDNEETFLKKYLYEIARRHPYFYAPELLFFAKRYKAAFTECCQAADKAACLLPKLDELRDEGKASSAKQRLKCASLQKFGERAFKAWAVARLSQRFPKAEFAEVSKLVTDLTKVHTECCHGDLLECADDRADLAKYICENQDSISSKLKECCEKPLLEKSHCIAEVENDEMPADLPSLAADFVESKDVCKNYAEAKDVFLGMFLYEYARRHPDYSVVLLLRLAKTYETTLEKCCAAADPHECYAKVFDEFKPLVEEPQNLIKQNCELFEQLGEYKFQNALLVRYTKKVPQVSTPTLVEVSRNLGKVGSKCCKHPEAKRMPCAEDYLSVVLNQLCVLHEKTPVSDRVTKCCTESLVNRRPCFSALEVDETYVPKEFNAETFTFHADICTLSEKERQIKKQTALVELVKHKPKATKEQLKAVMDKFAAFVEKCCKADDKETCFAEEGPKLVAASKAALGL

SEQ ID NO: 231 - protein, 585 aa, Artificial Sequence
  Synthetic
DAHKSEVAHRFKDLGEENFKALVLIAFAQYLQQCPFEDHVKLVNEVTEFAKTCVADESAENCDKSLHTLFGDKLCTVATLRETYGEMADCCAKQEPERNECFLQHKDDNPNLPRLVRPEVDVMCTAFHDNEETFLKKYLYEIARRHPYFYAPELLFFAKRYKAAFTECCQAADKAACLLPKLDELRDEGKASSAKQRLKCASLQKFGERAFKAWAVARLSQRFPKAEFAEVSKLVTDLTKVHTECCHGDLLECADDRADLAKYICENQDSISSKLKECCEKPLLEKSHCIAEVENDEMPADLPSLAADFVESKDVCKNYAEAKDVFLGMFLYEYARRHPDYSVVLLLRLAKTYETTLEKCCAAADPHECYAKVFDEFKPLVEEPQNLIKQNCELFEQLGEYKFQNALLVRYTKKVPQVSTPTLVEVSRNLGKVGSKCCKHPEAKRMPCAEDYLSVVLNQLCVLHEKTPVSDRVTKCCTESLVNRRPCFSALDVDETYVPKEFNAETFTFHADICTLSEKERQIKKQTALVELVKHKPKATKEQLKAVMDDFAAFVEKCCKADDKETCFAEEGPKLVAASKAALGL

SEQ ID NO: 232 - protein, 585 aa, Artificial Sequence
  Synthetic
DAHKSEVAHRFKDLGEENFKALVLIAFAQYLQQSPFEDHVKLVNEVTEFAKTCVADESAENCDKSLHTLFGDKLCTVATLRETYGEMADCCAKQEPERNECFLQHKDDNPNLPRLVRPEVDVMCTAFHDNEETFLKKYLYEIARRHPYFYAPELLFFAKRYKAAFTECCQAADKAACLLPKLDELRDEGKASSAKQRLKCASLQKFGERAFKAWAVARLSQRFPKAEFAEVSKLVTDLTKVHTECCHGDLLECADDRADLAKYICENQDSISSKLKECCEKPLLEKSHCIAEVENDEMPADLPSLAADFVESKDVCKNYAEAKDVFLGMFLYEYARRHPDYSVVLLLRLAKTYETTLEKCCAAADPHECYAKVFDEFKPLVEEPQNLIKQNCELFEQLGEYKFQNALLVRYTKKVPQVSTPTLVEVSRNLGKVGSKCCKHPEAKRMPCAEDYLSVVLNQLCVLHEKTPVSDRVTKCCTESLVNRRPCFSALEVDETYVPKEFNAETFTFHADICTLSEKERQIKKQTALVELVKHKPKATKEQLKAVMDDFAAFVEKCCKADDKETCFAEEGKKLVAASQAALGL

SEQ ID NO: 233 - protein, 585 aa, Artificial Sequence
  Synthetic
DAHKSEVAHRFKDLGEENFKALVLIAFAQYLQQSPFEDHVKLVNEVTEFAKTCVADESAENCDKSLHTLFGDKLCTVATLRETYGEMADCCAKQEPERNECFLQHKDDNPNLPRLVRPEVDVMCTAFHDNEETFLKKYLYEIARRHPYFYAPELLFFAKRYKAAFTECCQAADKAACLLPKLDELRDEGKASSAKQRLKCASLQKFGERAFKAWAVARLSQRFPKAEFAEVSKLVTDLTKVHTECCHGDLLECADDRADLAKYICENQDSISSKLKECCEKPLLEKSHCIAEVENDEMPADLPSLAADFVESKDVCKNYAEAKDVFLGMFLYEYARRHPDYSVVLLLRLAKTYETTLEKCCAAADPHECYAKVFDEFKPLVEEPQNLIKQNCELFEQLGEYKFQNALLVRYTKKVPQVSTPTLVEVSRNLGKVGSKCCKHPEAKRMPCAEDYLSVVLNQLCVLHEKTPVSDRVTKCCTESLVNRRPCFSALEVDETYVPKEFNAGTFTFHADICTLSEKERQIKKQTALVELVKHKPKATKEQLKAAMDDFAAFVEKCCKADDKETCFAEEGKKLVAASQAALGL

SEQ ID NO: 234 - protein, 585 aa, Artificial Sequence
  Synthetic
DAHKSEVAHRFKDLGEENFKALVLIAFAQYLQQSPFEDHVKLVNEVTEFAKTCVADESAENCDKSLHTLFGDKLCTVATLRETYGEMADCCAKQEPERNECFLQHKDDNPNLPRLVRPEVDVMCTAFHDNEETFLKKYLYEIARRHPYFYAPELLFFAKRYKAAFTECCQAADKAACLLPKLDELRDEGKASSAKQRLKCASLQKFGERAFKAWAVARLSQRFPKAEFAEVSKLVTDLTKVHTECCHGDLLECADDRADLAKYICENQDSISSKLKECCEKPLLEKSHCIAEVENDEMPADLPSLAADFVESKDVCKNYAEAKDVFLGMFLYEYARRHPDYSVVLLLRLAKTYETTLEKCCAAADPHECYAKVFDEFKPLVEEPQNLIKQNCELFEQLGEYKFQNALLVRYTKKVPQVSTPTLVEVSRNLGKVGSKCCKHPEAKRMPCAEDYLSVVLNQLCVLHEKTPVSDRVTKCCTESLVNRRPCFSALEVDETYVPKEFNAETFTFHADICTLSEKERQIKKQTALVELVKHKPKATKEQLKAVMDDFAAFVEKCCKADDKETCFAEEGPKLVAASQAALGL

SEQ ID NO: 235 - protein, 585 aa, Artificial Sequence
  Synthetic
DAHKSEVAHRFKDLGEENFKALVLIAFAQYLQQSPFEDHVKLVNEVTEFAKTCVADESAENCDKSLHTLFGDKLCTVATLRETYGEMADCCAKQEPERNECFLQHKDDNPNLPRLVRPEVDVMCTAFHDNEETFLKKYLYEIARRHPYFYAPELLFFAKRYKAAFTECCQAADKAACLLPKLDELRDEGKASSAKQRLKCASLQKFGERAFKAWAVARLSQRFPKAEFAEVSKLVTDLTKVHTECCHGDLLECADDRADLAKYICENQDSISSKLKECCEKPLLEKSHCIAEVENDEMPADLPSLAADFVESKDVCKNYAEAKDVFLGMFLYEYARRHPDYSVVLLLRLAKTYETTLEKCCAAADPHECYAKVFDEFKPLVEEPQNLIKQNCELFEQLGEYKFQNALLVRYTKKVPQVSTPTLVEVSRNLGKVGSKCCKHPEAKRMPCAEDYLSVVLNQLCVLHEKTPVSDRVTKCCTESLVNRRPCFSALDVDETYVPKEFNAETFTFHADICTLSEKERQIKKQTALVELVKHKPKATKEQLKAVMDDFAAFVEKCCKADDKETCFAEEGPHLVAASKAALGL

SEQ ID NO: 236 - protein, 585 aa, Artificial Sequence
  Synthetic
DAHKSEVAHRFKDLGEENFKALVLIAFAQYLQQSPFEDHVKLVNEVTEFAKTCVADESAENCDKSLHTLFGDKLCTVATLRETYGEMADCCAKQEPERNECFLQHKDDNPNLPRLVRPEVDVMCTAFHDNEETFLKKYLYEIARRHPYFYAPELLFFAKRYKAAFTECCQAADKAACLLPKLDELRDEGKASSAKQRLKCASLQKFGERAFKAWAVARLSQRFPKAEFAEVSKLVTDLTKVHTECCHGDLLECADDRADLAKYICENQDSISSKLKECCEKPLLEKSHCIAEVENDEMPADLPSLAADFVESKDVCKNYAEAKDVFLGMFLYEYARRHPDYSVVLLLRLAKTYETTLEKCCAAADPHECYAKVFDEFKPLVEEPQNLIKQNCELFEQLGEYKFQNALLVRYTKKVPQVSTPTLVEVSRNLGKVGSKCCKHPEAKRMPCAEDYLSVVLNQLCVLHEKTPVSDRVTKCCTESLVNRRPCFSALGVDETYVPKEFNAETFTFHADICTLSEKERQIKKQTALVELVKHKPKATKEQLKAVMDKFAAFVEKCCKADDKETCFAEEGPKLVAASQAALGL

SEQ ID NO: 237 - protein, 585 aa, Artificial Sequence
  Synthetic
DAHKSEVAHRFKDLGEENFKALVLIAFAQYLQQSPFEDHVKLVNEVTEFAKTCVADESAENCDKSLHTLFGDKLCTVATLRETYGEMADCCAKQEPERNECFLQHKDDNPNLPRLVRPEVDVMCTAFHDNEETFLKKYLYEIARRHPYFYAPELLFFAKRYKAAFTECCQAADKAACLLPKLDELRDEGKASSAKQRLKCASLQKFGERAFKAWAVARLSQRFPKAEFAEVSKLVTDLTKVHTECCHGDLLECADDRADLAKYICENQDSISSKLKECCEKPLLEKSHCIAEVENDEMPADLPSLAADFVESKDVCKNYAEAKDVFLGMFLYEYARRHPDYSVVLLLRLAKTYETTLEKCCAAADPHECYAKVFDEFKPLVEEPQNLIKQNCELFEQLGEYKFQNALLVRYTKKVPQVSTPTLVEVSRNLGKVGSKCCKHPEAKRMPCAEDYLSVVLNQLCVLHEKTPVSDRVTKCCTESLVNRRPCFSALDVDETYVPKEFNAETFTFHADICTLSEKERQIKKQTALVELVKHKPKATKEQLKAVMDKFAAFVEKCCKADDKETCFAEEGPKLVAASQAALGL

SEQ ID NO: 238 - protein, 585 aa, Artificial Sequence
  Synthetic
DAHKSEVAHRFKDLGEENFKALVLIAFAQYLQQSPFEDHVKLVNEVTEFAKTCVADESAENCDKSLHTLFGDKLCTVATLRETYGEMADCCAKQEPERNECFLQHKDDNPNLPRLVRPEVDVMCTAFHDNEETFLKKYLYEIARRHPYFYAPELLFFAKRYKAAFTECCQAADKAACLLPKLDELRDEGKASSAKQRLKCASLQKFGERAFKAWAVARLSQRFPKAEFAEVSKLVTDLTKVHTECCHGDLLECADDRADLAKYICENQDSISSKLKECCEKPLLEKSHCIAEVENDEMPADLPSLAADFVESKDVCKNYAEAKDVFLGMFLYEYARRHPDYSVVLLLRLAKTYETTLEKCCAAADPHECYAKVFDEFKPLVEEPQNLIKQNCELFEQLGEYKFQNALLVRYTKKVPQVSTPTLVEVSRNLGKVGSKCCKHPEAKRMPCAEDYLSVVLNQLCVLHEKTPVSDRVTKCCTESLVNRRPCFSALEVDETYVPKEFNAETFTFHADICTLSEKERQIKKQTALVELVKHKPKATKEQLKAVMDKFAAFVEKCCKADDKETCFAEEGPHLVAASQAALGL

SEQ ID NO: 239 - protein, 585 aa, Artificial Sequence
  Synthetic
DAHKSEVAHRFKDLGEENFKALVLIAFAQYLQQSPFEDHVKLVNEVTEFAKTCVADESAENCDKSLHTLFGDKLCTVATLRETYGEMADCCAKQEPERNECFLQHKDDNPNLPRLVRPEVDVMCTAFHDNEETFLKKYLYEIARRHPYFYAPELLFFAKRYKAAFTECCQAADKAACLLPKLDELRDEGKASSAKQRLKCASLQKFGERAFKAWAVARLSQRFPKAEFAEVSKLVTDLTKVHTECCHGDLLECADDRADLAKYICENQDSISSKLKECCEKPLLEKSHCIAEVENDEMPADLPSLAADFVESKDVCKNYAEAKDVFLGMFLYEYARRHPDYSVVLLLRLAKTYETTLEKCCAAADPHECYAKVFDEFKPLVEEPQNLIKQNCELFEQLGEYKFQNALLVRYTKKVPQVSTPTLVEVSRNLGKVGSKCCKHPEAKRMPCAEDYLSVVLNQLCVLHEKTPVSDRVTKCCTESLVNRRPCFSALEVDETYVPKEFNAETFTFHADICTLSEKERQIKKQTALVELVKHKPKATKEQLKAVMDDFAAFVEKCCKADDKETCFAEEGPHLVAASKAALGL

SEQ ID NO: 240 - protein, 585 aa, Artificial Sequence
  Synthetic
DAHKSEVAHRFKDLGEENFKALVLIAFAQYLQQSPFEDHVKLVNEVTEFAKTCVADESAENCDKSLHTLFGDKLCTVATLRETYGEMADCCAKQEPERNECFLQHKDDNPNLPRLVRPEVDVMCTAFHDNEETFLKKYLYEIARRHPYFYAPELLFFAKRYKAAFTECCQAADKAACLLPKLDELRDEGKASSAKQRLKCASLQKFGERAFKAWAVARLSQRFPKAEFAEVSKLVTDLTKVHTECCHGDLLECADDRADLAKYICENQDSISSKLKECCEKPLLEKSHCIAEVENDEMPADLPSLAADFVESKDVCKNYAEAKDVFLGMFLYEYARRHPDYSVVLLLRLAKTYETTLEKCCAAADPHECYAKVFDEFKPLVEEPQNLIKQNCELFEQLGEYKFQNALLVRYTKKVPQVSTPTLVEVSRNLGKVGSKCCKHPEAKRMPCAEDYLSVVLNQLCVLHEKTPVSDRVTKCCTESLVNRRPCFSALEVDETYVPKEFNAETFTFHADICTLSEKERQIKKQTALVELVKHKPKATKEQLKAVMDKFAAFVEKCCKADDKETCFAEEGPKLVAASKAALGL

SEQ ID NO: 241 - protein, 585 aa, Artificial Sequence
  Synthetic
DAHKSEVAHRFKDLGEENFKALVLIAFAQYLQQSPFEDHVKLVNEVTEFAKTCVADESAENCDKSLHTLFGDKLCTVATLRETYGEMADCCAKQEPERNECFLQHKDDNPNLPRLVRPEVDVMCTAFHDNEETFLKKYLYEIARRHPYFYAPELLFFAKRYKAAFTECCQAADKAACLLPKLDELRDEGKASSAKQRLKCASLQKFGERAFKAWAVARLSQRFPKAEFAEVSKLVTDLTKVHTECCHGDLLECADDRADLAKYICENQDSISSKLKECCEKPLLEKSHCIAEVENDEMPADLPSLAADFVESKDVCKNYAEAKDVFLGMFLYEYARRHPDYSVVLLLRLAKTYETTLEKCCAAADPHECYAKVFDEFKPLVEEPQNLIKQNCELFEQLGEYKFQNALLVRYTKKVPQVSTPTLVEVSRNLGKVGSKCCKHPEAKRMPCAEDYLSVVLNQLCVLHEKTPVSDRVTKCCTESLVNRRPCFSALDVDETYVPKEFNAETFTFHADICTLSEKERQIKKQTALVELVKHKPKATKEQLKAVMDDFAAFVEKCCKADDKETCFAEEGPKLVAASKAALGL

SEQ ID NO: 242 - protein, 585 aa, Artificial Sequence
  Synthetic
DAHKSEVAHRFKDLGEENFKALVLIAFAQYLQQAPFEDHVKLVNEVTEFAKTCVADESAENCDKSLHTLFGDKLCTVATLRETYGEMADCCAKQEPERNECFLQHKDDNPNLPRLVRPEVDVMCTAFHDNEETFLKKYLYEIARRHPYFYAPELLFFAKRYKAAFTECCQAADKAACLLPKLDELRDEGKASSAKQRLKCASLQKFGERAFKAWAVARLSQRFPKAEFAEVSKLVTDLTKVHTECCHGDLLECADDRADLAKYICENQDSISSKLKECCEKPLLEKSHCIAEVENDEMPADLPSLAADFVESKDVCKNYAEAKDVFLGMFLYEYARRHPDYSVVLLLRLAKTYETTLEKCCAAADPHECYAKVFDEFKPLVEEPQNLIKQNCELFEQLGEYKFQNALLVRYTKKVPQVSTPTLVEVSRNLGKVGSKCCKHPEAKRMPCAEDYLSVVLNQLCVLHEKTPVSDRVTKCCTESLVNRRPCFSALEVDETYVPKEFNAETFTFHADICTLSEKERQIKKQTALVELVKHKPKATKEQLKAVMDDFAAFVEKCCKADDKETCFAEEGKKLVAASQAALGL

SEQ ID NO: 243 - protein, 585 aa, Artificial Sequence
  Synthetic
DAHKSEVAHRFKDLGEENFKALVLIAFAQYLQQAPFEDHVKLVNEVTEFAKTCVADESAENCDKSLHTLFGDKLCTVATLRETYGEMADCCAKQEPERNECFLQHKDDNPNLPRLVRPEVDVMCTAFHDNEETFLKKYLYEIARRHPYFYAPELLFFAKRYKAAFTECCQAADKAACLLPKLDELRDEGKASSAKQRLKCASLQKFGERAFKAWAVARLSQRFPKAEFAEVSKLVTDLTKVHTECCHGDLLECADDRADLAKYICENQDSISSKLKECCEKPLLEKSHCIAEVENDEMPADLPSLAADFVESKDVCKNYAEAKDVFLGMFLYEYARRHPDYSVVLLLRLAKTYETTLEKCCAAADPHECYAKVFDEFKPLVEEPQNLIKQNCELFEQLGEYKFQNALLVRYTKKVPQVSTPTLVEVSRNLGKVGSKCCKHPEAKRMPCAEDYLSVVLNQLCVLHEKTPVSDRVTKCCTESLVNRRPCFSALEVDETYVPKEFNAGTFTFHADICTLSEKERQIKKQTALVELVKHKPKATKEQLKAAMDDFAAFVEKCCKADDKETCFAEEGKKLVAASQAALGL

SEQ ID NO: 244 - protein, 585 aa, Artificial Sequence
  Synthetic
DAHKSEVAHRFKDLGEENFKALVLIAFAQYLQQAPFEDHVKLVNEVTEFAKTCVADESAENCDKSLHTLFGDKLCTVATLRETYGEMADCCAKQEPERNECFLQHKDDNPNLPRLVRPEVDVMCTAFHDNEETFLKKYLYEIARRHPYFYAPELLFFAKRYKAAFTECCQAADKAACLLPKLDELRDEGKASSAKQRLKCASLQKFGERAFKAWAVARLSQRFPKAEFAEVSKLVTDLTKVHTECCHGDLLECADDRADLAKYICENQDSISSKLKECCEKPLLEKSHCIAEVENDEMPADLPSLAADFVESKDVCKNYAEAKDVFLGMFLYEYARRHPDYSVVLLLRLAKTYETTLEKCCAAADPHECYAKVFDEFKPLVEEPQNLIKQNCELFEQLGEYKFQNALLVRYTKKVPQVSTPTLVEVSRNLGKVGSKCCKHPEAKRMPCAEDYLSVVLNQLCVLHEKTPVSDRVTKCCTESLVNRRPCFSALEVDETYVPKEFNAETFTFHADICTLSEKERQIKKQTALVELVKHKPKATKEQLKAVMDDFAAFVEKCCKADDKETCFAEEGPKLVAASQAALGL

SEQ ID NO: 245 - protein, 585 aa, Artificial Sequence
  Synthetic
DAHKSEVAHRFKDLGEENFKALVLIAFAQYLQQAPFEDHVKLVNEVTEFAKTCVADESAENCDKSLHTLFGDKLCTVATLRETYGEMADCCAKQEPERNECFLQHKDDNPNLPRLVRPEVDVMCTAFHDNEETFLKKYLYEIARRHPYFYAPELLFFAKRYKAAFTECCQAADKAACLLPKLDELRDEGKASSAKQRLKCASLQKFGERAFKAWAVARLSQRFPKAEFAEVSKLVTDLTKVHTECCHGDLLECADDRADLAKYICENQDSISSKLKECCEKPLLEKSHCIAEVENDEMPADLPSLAADFVESKDVCKNYAEAKDVFLGMFLYEYARRHPDYSVVLLLRLAKTYETTLEKCCAAADPHECYAKVFDEFKPLVEEPQNLIKQNCELFEQLGEYKFQNALLVRYTKKVPQVSTPTLVEVSRNLGKVGSKCCKHPEAKRMPCAEDYLSVVLNQLCVLHEKTPVSDRVTKCCTESLVNRRPCFSALDVDETYVPKEFNAETFTFHADICTLSEKERQIKKQTALVELVKHKPKATKEQLKAVMDDFAAFVEKCCKADDKETCFAEEGPHLVAASKAALGL

SEQ ID NO: 246 - protein, 585 aa, Artificial Sequence
  Synthetic
DAHKSEVAHRFKDLGEENFKALVLIAFAQYLQQAPFEDHVKLVNEVTEFAKTCVADESAENCDKSLHTLFGDKLCTVATLRETYGEMADCCAKQEPERNECFLQHKDDNPNLPRLVRPEVDVMCTAFHDNEETFLKKYLYEIARRHPYFYAPELLFFAKRYKAAFTECCQAADKAACLLPKLDELRDEGKASSAKQRLKCASLQKFGERAFKAWAVARLSQRFPKAEFAEVSKLVTDLTKVHTECCHGDLLECADDRADLAKYICENQDSISSKLKECCEKPLLEKSHCIAEVENDEMPADLPSLAADFVESKDVCKNYAEAKDVFLGMFLYEYARRHPDYSVVLLLRLAKTYETTLEKCCAAADPHECYAKVFDEFKPLVEEPQNLIKQNCELFEQLGEYKFQNALLVRYTKKVPQVSTPTLVEVSRNLGKVGSKCCKHPEAKRMPCAEDYLSVVLNQLCVLHEKTPVSDRVTKCCTESLVNRRPCFSALGVDETYVPKEFNAETFTFHADICTLSEKERQIKKQTALVELVKHKPKATKEQLKAVMDKFAAFVEKCCKADDKETCFAEEGPKLVAASQAALGL

SEQ ID NO: 247 - protein, 585 aa, Artificial Sequence
  Synthetic
DAHKSEVAHRFKDLGEENFKALVLIAFAQYLQQAPFEDHVKLVNEVTEFAKTCVADESAENCDKSLHTLFGDKLCTVATLRETYGEMADCCAKQEPERNECFLQHKDDNPNLPRLVRPEVDVMCTAFHDNEETFLKKYLYEIARRHPYFYAPELLFFAKRYKAAFTECCQAADKAACLLPKLDELRDEGKASSAKQRLKCASLQKFGERAFKAWAVARLSQRFPKAEFAEVSKLVTDLTKVHTECCHGDLLECADDRADLAKYICENQDSISSKLKECCEKPLLEKSHCIAEVENDEMPADLPSLAADFVESKDVCKNYAEAKDVFLGMFLYEYARRHPDYSVVLLLRLAKTYETTLEKCCAAADPHECYAKVFDEFKPLVEEPQNLIKQNCELFEQLGEYKFQNALLVRYTKKVPQVSTPTLVEVSRNLGKVGSKCCKHPEAKRMPCAEDYLSVVLNQLCVLHEKTPVSDRVTKCCTESLVNRRPCFSALDVDETYVPKEFNAETFTFHADICTLSEKERQIKKQTALVELVKHKPKATKEQLKAVMDKFAAFVEKCCKADDKETCFAEEGPKLVAASQAALGL

SEQ ID NO: 248 - protein, 585 aa, Artificial Sequence
  Synthetic
DAHKSEVAHRFKDLGEENFKALVLIAFAQYLQQAPFEDHVKLVNEVTEFAKTCVADESAENCDKSLHTLFGDKLCTVATLRETYGEMADCCAKQEPERNECFLQHKDDNPNLPRLVRPEVDVMCTAFHDNEETFLKKYLYEIARRHPYFYAPELLFFAKRYKAAFTECCQAADKAACLLPKLDELRDEGKASSAKQRLKCASLQKFGERAFKAWAVARLSQRFPKAEFAEVSKLVTDLTKVHTECCHGDLLECADDRADLAKYICENQDSISSKLKECCEKPLLEKSHCIAEVENDEMPADLPSLAADFVESKDVCKNYAEAKDVFLGMFLYEYARRHPDYSVVLLLRLAKTYETTLEKCCAAADPHECYAKVFDEFKPLVEEPQNLIKQNCELFEQLGEYKFQNALLVRYTKKVPQVSTPTLVEVSRNLGKVGSKCCKHPEAKRMPCAEDYLSVVLNQLCVLHEKTPVSDRVTKCCTESLVNRRPCFSALEVDETYVPKEFNAETFTFHADICTLSEKERQIKKQTALVELVKHKPKATKEQLKAVMDKFAAFVEKCCKADDKETCFAEEGPHLVAASQAALGL

SEQ ID NO: 249 - protein, 585 aa, Artificial Sequence
  Synthetic
DAHKSEVAHRFKDLGEENFKALVLIAFAQYLQQAPFEDHVKLVNEVTEFAKTCVADESAENCDKSLHTLFGDKLCTVATLRETYGEMADCCAKQEPERNECFLQHKDDNPNLPRLVRPEVDVMCTAFHDNEETFLKKYLYEIARRHPYFYAPELLFFAKRYKAAFTECCQAADKAACLLPKLDELRDEGKASSAKQRLKCASLQKFGERAFKAWAVARLSQRFPKAEFAEVSKLVTDLTKVHTECCHGDLLECADDRADLAKYICENQDSISSKLKECCEKPLLEKSHCIAEVENDEMPADLPSLAADFVESKDVCKNYAEAKDVFLGMFLYEYARRHPDYSVVLLLRLAKTYETTLEKCCAAADPHECYAKVFDEFKPLVEEPQNLIKQNCELFEQLGEYKFQNALLVRYTKKVPQVSTPTLVEVSRNLGKVGSKCCKHPEAKRMPCAEDYLSVVLNQLCVLHEKTPVSDRVTKCCTESLVNRRPCFSALEVDETYVPKEFNAETFTFHADICTLSEKERQIKKQTALVELVKHKPKATKEQLKAVMDDFAAFVEKCCKADDKETCFAEEGPHLVAASKAALGL

SEQ ID NO: 250 - protein, 585 aa, Artificial Sequence
  Synthetic
DAHKSEVAHRFKDLGEENFKALVLIAFAQYLQQAPFEDHVKLVNEVTEFAKTCVADESAENCDKSLHTLFGDKLCTVATLRETYGEMADCCAKQEPERNECFLQHKDDNPNLPRLVRPEVDVMCTAFHDNEETFLKKYLYEIARRHPYFYAPELLFFAKRYKAAFTECCQAADKAACLLPKLDELRDEGKASSAKQRLKCASLQKFGERAFKAWAVARLSQRFPKAEFAEVSKLVTDLTKVHTECCHGDLLECADDRADLAKYICENQDSISSKLKECCEKPLLEKSHCIAEVENDEMPADLPSLAADFVESKDVCKNYAEAKDVFLGMFLYEYARRHPDYSVVLLLRLAKTYETTLEKCCAAADPHECYAKVFDEFKPLVEEPQNLIKQNCELFEQLGEYKFQNALLVRYTKKVPQVSTPTLVEVSRNLGKVGSKCCKHPEAKRMPCAEDYLSVVLNQLCVLHEKTPVSDRVTKCCTESLVNRRPCFSALEVDETYVPKEFNAETFTFHADICTLSEKERQIKKQTALVELVKHKPKATKEQLKAVMDKFAAFVEKCCKADDKETCFAEEGPKLVAASKAALGL

SEQ ID NO: 251 - protein, 585 aa, Artificial Sequence
  Synthetic
DAHKSEVAHRFKDLGEENFKALVLIAFAQYLQQAPFEDHVKLVNEVTEFAKTCVADESAENCDKSLHTLFGDKLCTVATLRETYGEMADCCAKQEPERNECFLQHKDDNPNLPRLVRPEVDVMCTAFHDNEETFLKKYLYEIARRHPYFYAPELLFFAKRYKAAFTECCQAADKAACLLPKLDELRDEGKASSAKQRLKCASLQKFGERAFKAWAVARLSQRFPKAEFAEVSKLVTDLTKVHTECCHGDLLECADDRADLAKYICENQDSISSKLKECCEKPLLEKSHCIAEVENDEMPADLPSLAADFVESKDVCKNYAEAKDVFLGMFLYEYARRHPDYSVVLLLRLAKTYETTLEKCCAAADPHECYAKVFDEFKPLVEEPQNLIKQNCELFEQLGEYKFQNALLVRYTKKVPQVSTPTLVEVSRNLGKVGSKCCKHPEAKRMPCAEDYLSVVLNQLCVLHEKTPVSDRVTKCCTESLVNRRPCFSALDVDETYVPKEFNAETFTFHADICTLSEKERQIKKQTALVELVKHKPKATKEQLKAVMDDFAAFVEKCCKADDKETCFAEEGPKLVAASKAALGL

SEQ ID NO: 252 - protein, 330 aa, Artificial Sequence
  Synthetic
ASTKGPSVFPLAPSSKSTSGGTAALGCLVKDYFPEPVTVSWNSGALTSGVHTFPAVLQSSGLYSLSSVVTVPSSSLGTQTYICNVNHKPSNTKVDKKVEPKSCDKTHTCPPCPAPELLGGPSVFLFPPKPKDTLMISRTPEVTCVVVDVSHEDPEVKFNWYVDGVEVHNAKTKPCEEQYGSTYRCVSVLTVLHQDWLNGKEYKCKVSNKALPAPIEKTISKAKGQPREPQVYTLPPSREEMTKNQVSLTCLVKGFYPSDIAVEWESNGQPENNYDTTPPVLDSDGSFFLYSDLTVDKSRWQQGNVFSCSVMHEALHNHYTQKSLSLSPGK

SEQ ID NO: 253 - protein, 333 aa, Artificial Sequence
  Synthetic
GQPKAAPSVTLFPPSSEELQANKATLVCLISDFYPGAVTVAWKADSSPVKAGVETTTPSKQSNNKYAASSYLSLTPEQWKSHRSYSCQVTHEGSTVEKTVAPTECSDKTHTCPPCPAPELLGGPSVFLFPPKPKDTLMISRTPEVTCVVVDVSHEDPEVKFNWYVDGVEVHNAKTKPCEEQYGSTYRCVSVLTVLHQDWLNGKEYKCKVSNKALPAPIEKTISKAKGQPREPQVYTLPPSRKEMTKNQVSLTCLVKGFYPSDIAVEWESNGQPENNYKTTPPVLKSDGSFFLYSKLTVDKSRWQQGNVFSCSVMHEALHNHYTQKSLSLSPGK

SEQ ID NO: 254 - protein, 330 aa, Artificial Sequence
  Synthetic
ASTKGPSVFPLAPCSRSTSESTAALGCLVKDYFPEPVTVSWNSGALTSGVHTFPAVLQSSGLYSLSSVVTVPSSNFGTQTYTCNVDHKPSNTKVDKTVEPKSSDKTHTCPPCPAPEAAGGPSVFLFPPKPKDTLMISRTPEVTCVVVDVSHEDPEVKFNWYVDGVEVHNAKTKPREEQYNSTYRVVSVLTVLHQDWLNGKEYKCKVSNKALPAPIEKTISKAKGQPREPQVYTLPPSREEMTKNQVSLTCLVKGFYPSDIAVEWESNGQPENNYDTTPPVLDSDGSFFLYSDLTVDKSRWQQGNVFSCSVMHEALHNHYTQKSLSLSPGK

SEQ ID NO: 255 - protein, 338 aa, Artificial Sequence
  Synthetic
GQPKAAPSVTLFPPSSEELQANKATLVCLISDFYPGAVTVAWKADSSPVKAGVETTTPSKQSNNKYAASSYLSLTPEQWKSHRSYSCQVTHEGSTVEKTVAPTECSEPKSSDKTHTCPPCPAPEAAGGPSVFLFPPKPKDTLMISRTPEVTCVVVDVSHEDPEVKFNWYVDGVEVHNAKTKPREEQYNSTYRVVSVLTVLHQDWLNGKEYKCKVSNKALPAPIEKTISKAKGQPREPQVYTLPPSRKEMTKNQVSLTCLVKGFYPSDIAVEWESNGQPENNYKTTPPVLKSDGSFFLYSKLTVDKSRWQQGNVFSCSVMHEALHNHYTQKSLSLSPGK

SEQ ID NO: 256 - protein, 227 aa, Artificial Sequence
  Synthetic
DKTHTCPPCPAPELLGGPSVFLFPPKPKDTLMISRTPEVTCVVVDVSHEDPEVKFNWYVDGVEVHNAKTKPCEEQYGSTYRCVSVLTVLHQDWLNGKEYKCKVSNKALPAPIEKTISKAKGQPREPQVYTLPPSRKEMTKNQVSLTCLVKGFYPSDIAVEWESNGQPENNYKTTPPVLKSDGSFFLYSKLTVDKSRWQQGNVFSCSVMHEALHNHYTQKSLSLSPGK

SEQ ID NO: 257 - protein, 227 aa, Artificial Sequence
  Synthetic
DKTHTCPPCPAPELLGGPSVFLFPPKPKDTLMISRTPEVTCVVVDVSHEDPEVKFNWYVDGVEVHNAKTKPCEEQYGSTYRCVSVLTVLHQDWLNGKEYKCKVSNKALPAPIEKTISKAKGQPREPQVYTLPPSREEMTKNQVSLTCLVKGFYPSDIAVEWESNGQPENNYDTTPPVLDSDGSFFLYSDLTVDKSRWQQGNVFSCSVMHEALHNHYTQKSLSLSPGK

SEQ ID NO: 258 - protein, 232 aa, Artificial Sequence
  Synthetic
EPKSSDKTHTCPPCPAPELLGGPSVFLFPPKPKDTLMISRTPEVTCVVVDVSHEDPEVKFNWYVDGVEVHNAKTKPCEEQYGSTYRCVSVLTVLHQDWLNGKEYKCKVSNKALPAPIEKTISKAKGQPREPQVYTLPPSRKEMTKNQVSLTCLVKGFYPSDIAVEWESNGQPENNYKTTPPVLKSDGSFFLYSKLTVDKSRWQQGNVFSCSVMHEALHNHYTQKSLSLSPGK

SEQ ID NO: 259 - protein, 232 aa, Artificial Sequence
  Synthetic
EPKSSDKTHTCPPCPAPELLGGPSVFLFPPKPKDTLMISRTPEVTCVVVDVSHEDPEVKFNWYVDGVEVHNAKTKPCEEQYGSTYRCVSVLTVLHQDWLNGKEYKCKVSNKALPAPIEKTISKAKGQPREPQVYTLPPSREEMTKNQVSLTCLVKGFYPSDIAVEWESNGQPENNYDTTPPVLDSDGSFFLYSDLTVDKSRWQQGNVFSCSVMHEALHNHYTQKSLSLSPGK

SEQ ID NO: 260 - protein, 232 aa, Artificial Sequence
  Synthetic
EPKSSDKTHTCPPCPAPEAAGGPSVFLFPPKPKDTLMISRTPEVTCVVVDVSHEDPEVKFNWYVDGVEVHNAKTKPREEQYNSTYRVVSVLTVLHQDWLNGKEYKCKVSNKALPAPIEKTISKAKGQPREPQVYTLPPSRKEMTKNQVSLTCLVKGFYPSDIAVEWESNGQPENNYKTTPPVLKSDGSFFLYSKLTVDKSRWQQGNVFSCSVMHEALHNHYTQKSLSLSPGK

SEQ ID NO: 261 - protein, 232 aa, Artificial Sequence
  Synthetic
EPKSSDKTHTCPPCPAPEAAGGPSVFLFPPKPKDTLMISRTPEVTCVVVDVSHEDPEVKFNWYVDGVEVHNAKTKPREEQYNSTYRVVSVLTVLHQDWLNGKEYKCKVSNKALPAPIEKTISKAKGQPREPQVYTLPPSREEMTKNQVSLTCLVKGFYPSDIAVEWESNGQPENNYDTTPPVLDSDGSFFLYSDLTVDKSRWQQGNVFSCSVMHEALHNHYTQKSLSLSPGK

SEQ ID NO: 262 - protein, 217 aa, Artificial Sequence
  Synthetic
APELLGGPSVFLFPPKPKDTLMISRTPEVTCVVVDVSHEDPEVKFNWYVDGVEVHNAKTKPREEQYNSTYRVVSVLTVLHQDWLNGKEYKCKVSNKALPAPIEKTISKAKGQPREPQVTTLPPSREEMTKNQVSLTCLVKGFYPSDIAVEWESNGQPENNYDTTPPVLDSDGSFFLYSDLTVDKSRWQQGNVFSCSVMHEALHNHYTQKSLSLSPGK

SEQ ID NO: 263 - protein, 227 aa, Artificial Sequence
  Synthetic
DKTHTCPPCPAPELLGGPSVFLFPPKPKDTLMISRTPEVTCVVVDVSHEDPEVKFNWYVDGVEVHNAKTKPCEEQYGSTYRCVSVLTVLHQDWLNGKEYKCKVSNKALPAPIEKTISKAKGQPREPQVYTLPPSREEMTKNQVSLTCLVKGFYPSDIAVEWESNGQPENNYKTTPPVLDSDGSFFLYSKLTVDKSRWQQGNVFSCSVMHEALHNHYTQKSLSLSPGK

SEQ ID NO: 264 - protein, 225 aa, Artificial Sequence
  Synthetic
DKTHTCPPCPAPELLGGPSVFLFPPKPKDTLMISRTPEVTCVVVDVSHEDPEVKFNWYVDGVEVHNAKTKPCEEQYGSTYRCVSVLTVLHQDWLNGKEYKCKVSNKALPAPIEKTISKAKGQPREPQVYTLPPSREEMTKNQVSLTCLVKGFYPSDIAVEWESNGQPENNYKTTPPVLDSDGSFFLYSKLTVDKSRWQQGNVFSCSVMHEALHNHYTQKSLSLSP

SEQ ID NO: 265 - protein, 227 aa, Artificial Sequence
  Synthetic
DKTHTCPPCPAPELLGGPSVFLFPPKPKDTLMISRTPEVTCVVVDVSHEDPEVKFNWYVDGVEVHNAKTKPREEQYNSTYRVVSVLTVLHQDWLNGKEYKCKVSNKALPAPIEKTISKAKGQPREPQVYTLPPSREEMTKNQVSLTCLVKGFYPSDIAVEWESNGQPENNYKTTPPVLDSDGSFFLYSKLTVDKSRWQQGNVFSCSVMHEALHNHYTQKSLSLSPGK

SEQ ID NO: 266 - protein, 225 aa, Artificial Sequence
  Synthetic
DKTHTCPPCPAPELLGGPSVFLFPPKPKDTLMISRTPEVTCVVVDVSHEDPEVKFNWYVDGVEVHNAKTKPREEQYNSTYRVVSVLTVLHQDWLNGKEYKCKVSNKALPAPIEKTISKAKGQPREPQVYTLPPSREEMTKNQVSLTCLVKGFYPSDIAVEWESNGQPENNYKTTPPVLDSDGSFFLYSKLTVDKSRWQQGNVFSCSVMHEALHNHYTQKSLSLSP

SEQ ID NO: 267 - protein, 227 aa, Artificial Sequence
  Synthetic
DKTHTCPPCPAPELLGGPSVFLFPPKPKDTLMISRTPEVTCVVVDVSHEDPEVKFNWYVDGVEVHNAKTKPREEQYGSTYRVVSVLTVLHQDWLNGKEYKCKVSNKALPAPIEKTISKAKGQPREPQVYTLPPSREEMTKNQVSLTCLVKGFYPSDIAVEWESNGQPENNYKTTPPVLDSDGSFFLYSKLTVDKSRWQQGNVFSCSVMHEALHNHYTQKSLSLSPGK

SEQ ID NO: 268 - protein, 225 aa, Artificial Sequence
  Synthetic
DKTHTCPPCPAPELLGGPSVFLFPPKPKDTLMISRTPEVTCVVVDVSHEDPEVKFNWYVDGVEVHNAKTKPREEQYGSTYRVVSVLTVLHQDWLNGKEYKCKVSNKALPAPIEKTISKAKGQPREPQVYTLPPSREEMTKNQVSLTCLVKGFYPSDIAVEWESNGQPENNYKTTPPVLDSDGSFFLYSKLTVDKSRWQQGNVFSCSVMHEALHNHYTQKSLSLSP

SEQ ID NO: 269 - protein, 227 aa, Artificial Sequence
  Synthetic
DKTHTCPPCPAPELLGGPSVFLFPPKPKDTLMISRTPEVTCVVVDVSHEDPEVKFNWYVDGVEVHNAKTKPCEEQYNSTYRCVSVLTVLHQDWLNGKEYKCKVSNKALPAPIEKTISKAKGQPREPQVYTLPPSREEMTKNQVSLTCLVKGFYPSDIAVEWESNGQPENNYKTTPPVLDSDGSFFLYSKLTVDKSRWQQGNVFSCSVMHEALHNHYTQKSLSLSPGK

SEQ ID NO: 270 - protein, 225 aa, Artificial Sequence
  Synthetic
DKTHTCPPCPAPELLGGPSVFLFPPKPKDTLMISRTPEVTCVVVDVSHEDPEVKFNWYVDGVEVHNAKTKPCEEQYNSTYRCVSVLTVLHQDWLNGKEYKCKVSNKALPAPIEKTISKAKGQPREPQVYTLPPSREEMTKNQVSLTCLVKGFYPSDIAVEWESNGQPENNYKTTPPVLDSDGSFFLYSKLTVDKSRWQQGNVFSCSVMHEALHNHYTQKSLSLSP

SEQ ID NO: 271 - protein, 484 aa, Artificial Sequence
  Synthetic
DKTHTCPPCPAPELLGGPSVFLFPPKPKDTLMISRTPEVTCVVVDVSHEDPEVKFNWYVDGVEVHNAKTKPCEEQYGSTYRCVSVLTVLHQDWLNGKEYKCKVSNKALPAPIEKTISKAKGQPREPQVYTLPPSREEMTKNQVSLTCLVKGFYPSDIAVEWESNGQPENNYKTTPPVLDSDGSFFLYSKLTVDKSRWQQGNVFSCSVMHEALHNHYTQKSLSLSPGKGGGGSGGGGSGGGGSGGGGSGGGGSGGGGSDKTHTCPPCPAPELLGGPSVFLFPPKPKDTLMISRTPEVTCVVVDVSHEDPEVKFNWYVDGVEVHNAKTKPCEEQYGSTYRCVSVLTVLHQDWLNGKEYKCKVSNKALPAPIEKTISKAKGQPREPQVYTLPPSREEMTKNQVSLTCLVKGFYPSDIAVEWESNGQPENNYKTTPPVLDSDGSFFLYSKLTVDKSRWQQGNVFSCSVMHEALHNHYTQKSLSLSPGK

SEQ ID NO: 272 - protein, 480 aa, Artificial Sequence
  Synthetic
DKTHTCPPCPAPELLGGPSVFLFPPKPKDTLMISRTPEVTCVVVDVSHEDPEVKFNWYVDGVEVHNAKTKPCEEQYGSTYRCVSVLTVLHQDWLNGKEYKCKVSNKALPAPIEKTISKAKGQPREPQVYTLPPSREEMTKNQVSLTCLVKGFYPSDIAVEWESNGQPENNYKTTPPVLDSDGSFFLYSKLTVDKSRWQQGNVFSCSVMHEALHNHYTQKSLSLSPGGGGSGGGGSGGGGSGGGGSGGGGSGGGGSDKTHTCPPCPAPELLGGPSVFLFPPKPKDTLMISRTPEVTCVVVDVSHEDPEVKFNWYVDGVEVHNAKTKPCEEQYGSTYRCVSVLTVLHQDWLNGKEYKCKVSNKALPAPIEKTISKAKGQPREPQVYTLPPSREEMTKNQVSLTCLVKGFYPSDIAVEWESNGQPENNYKTTPPVLDSDGSFFLYSKLTVDKSRWQQGNVFSCSVMHEALHNHYTQKSLSLSP

SEQ ID NO: 273 - protein, 484 aa, Artificial Sequence
  Synthetic
DKTHTCPPCPAPELLGGPSVFLFPPKPKDTLMISRTPEVTCVVVDVSHEDPEVKFNWYVDGVEVHNAKTKPREEQYNSTYRVVSVLTVLHQDWLNGKEYKCKVSNKALPAPIEKTISKAKGQPREPQVYTLPPSREEMTKNQVSLTCLVKGFYPSDIAVEWESNGQPENNYKTTPPVLDSDGSFFLYSKLTVDKSRWQQGNVFSCSVMHEALHNHYTQKSLSLSPGKGGGGSGGGGSGGGGSGGGGSGGGGSGGGGSDKTHTCPPCPAPELLGGPSVFLFPPKPKDTLMISRTPEVTCVVVDVSHEDPEVKFNWYVDGVEVHNAKTKPREEQYNSTYRVVSVLTVLHQDWLNGKEYKCKVSNKALPAPIEKTISKAKGQPREPQVYTLPPSREEMTKNQVSLTCLVKGFYPSDIAVEWESNGQPENNYKTTPPVLDSDGSFFLYSKLTVDKSRWQQGNVFSCSVMHEALHNHYTQKSLSLSPGK

SEQ ID NO: 274 - protein, 480 aa, Artificial Sequence
  Synthetic
DKTHTCPPCPAPELLGGPSVFLFPPKPKDTLMISRTPEVTCVVVDVSHEDPEVKFNWYVDGVEVHNAKTKPREEQYNSTYRVVSVLTVLHQDWLNGKEYKCKVSNKALPAPIEKTISKAKGQPREPQVYTLPPSREEMTKNQVSLTCLVKGFYPSDIAVEWESNGQPENNYKTTPPVLDSDGSFFLYSKLTVDKSRWQQGNVFSCSVMHEALHNHYTQKSLSLSPGGGGSGGGGSGGGGSGGGGSGGGGSGGGGSDKTHTCPPCPAPELLGGPSVFLFPPKPKDTLMISRTPEVTCVVVDVSHEDPEVKFNWYVDGVEVHNAKTKPREEQYNSTYRVVSVLTVLHQDWLNGKEYKCKVSNKALPAPIEKTISKAKGQPREPQVYTLPPSREEMTKNQVSLTCLVKGFYPSDIAVEWESNGQPENNYKTTPPVLDSDGSFFLYSKLTVDKSRWQQGNVFSCSVMHEALHNHYTQKSLSLSP

SEQ ID NO: 275 - protein, 484 aa, Artificial Sequence
  Synthetic
DKTHTCPPCPAPELLGGPSVFLFPPKPKDTLMISRTPEVTCVVVDVSHEDPEVKFNWYVDGVEVHNAKTKPREEQYGSTYRVVSVLTVLHQDWLNGKEYKCKVSNKALPAPIEKTISKAKGQPREPQVYTLPPSREEMTKNQVSLTCLVKGFYPSDIAVEWESNGQPENNYKTTPPVLDSDGSFFLYSKLTVDKSRWQQGNVFSCSVMHEALHNHYTQKSLSLSPGKGGGGSGGGGSGGGGSGGGGSGGGGSGGGGSDKTHTCPPCPAPELLGGPSVFLFPPKPKDTLMISRTPEVTCVVVDVSHEDPEVKFNWYVDGVEVHNAKTKPREEQYGSTYRVVSVLTVLHQDWLNGKEYKCKVSNKALPAPIEKTISKAKGQPREPQVYTLPPSREEMTKNQVSLTCLVKGFYPSDIAVEWESNGQPENNYKTTPPVLDSDGSFFLYSKLTVDKSRWQQGNVFSCSVMHEALHNHYTQKSLSLSPGK

SEQ ID NO: 276 - protein, 480 aa, Artificial Sequence
  Synthetic
DKTHTCPPCPAPELLGGPSVFLFPPKPKDTLMISRTPEVTCVVVDVSHEDPEVKFNWYVDGVEVHNAKTKPREEQYGSTYRVVSVLTVLHQDWLNGKEYKCKVSNKALPAPIEKTISKAKGQPREPQVYTLPPSREEMTKNQVSLTCLVKGFYPSDIAVEWESNGQPENNYKTTPPVLDSDGSFFLYSKLTVDKSRWQQGNVFSCSVMHEALHNHYTQKSLSLSPGGGGSGGGGSGGGGSGGGGSGGGGSGGGGSDKTHTCPPCPAPELLGGPSVFLFPPKPKDTLMISRTPEVTCVVVDVSHEDPEVKFNWYVDGVEVHNAKTKPREEQYGSTYRVVSVLTVLHQDWLNGKEYKCKVSNKALPAPIEKTISKAKGQPREPQVYTLPPSREEMTKNQVSLTCLVKGFYPSDIAVEWESNGQPENNYKTTPPVLDSDGSFFLYSKLTVDKSRWQQGNVFSCSVMHEALHNHYTQKSLSLSP

SEQ ID NO: 277 - protein, 484 aa, Artificial Sequence
  Synthetic
DKTHTCPPCPAPELLGGPSVFLFPPKPKDTLMISRTPEVTCVVVDVSHEDPEVKFNWYVDGVEVHNAKTKPCEEQYNSTYRCVSVLTVLHQDWLNGKEYKCKVSNKALPAPIEKTISKAKGQPREPQVYTLPPSREEMTKNQVSLTCLVKGFYPSDIAVEWESNGQPENNYKTTPPVLDSDGSFFLYSKLTVDKSRWQQGNVFSCSVMHEALHNHYTQKSLSLSPGKGGGGSGGGGSGGGGSGGGGSGGGGSGGGGSDKTHTCPPCPAPELLGGPSVFLFPPKPKDTLMISRTPEVTCVVVDVSHEDPEVKFNWYVDGVEVHNAKTKPCEEQYNSTYRCVSVLTVLHQDWLNGKEYKCKVSNKALPAPIEKTISKAKGQPREPQVYTLPPSREEMTKNQVSLTCLVKGFYPSDIAVEWESNGQPENNYKTTPPVLDSDGSFFLYSKLTVDKSRWQQGNVFSCSVMHEALHNHYTQKSLSLSPGK

SEQ ID NO: 278 - protein, 480 aa, Artificial Sequence
  Synthetic
DKTHTCPPCPAPELLGGPSVFLFPPKPKDTLMISRTPEVTCVVVDVSHEDPEVKFNWYVDGVEVHNAKTKPCEEQYNSTYRCVSVLTVLHQDWLNGKEYKCKVSNKALPAPIEKTISKAKGQPREPQVYTLPPSREEMTKNQVSLTCLVKGFYPSDIAVEWESNGQPENNYKTTPPVLDSDGSFFLYSKLTVDKSRWQQGNVFSCSVMHEALHNHYTQKSLSLSPGGGGSGGGGSGGGGSGGGGSGGGGSGGGGSDKTHTCPPCPAPELLGGPSVFLFPPKPKDTLMISRTPEVTCVVVDVSHEDPEVKFNWYVDGVEVHNAKTKPCEEQYNSTYRCVSVLTVLHQDWLNGKEYKCKVSNKALPAPIEKTISKAKGQPREPQVYTLPPSREEMTKNQVSLTCLVKGFYPSDIAVEWESNGQPENNYKTTPPVLDSDGSFFLYSKLTVDKSRWQQGNVFSCSVMHEALHNHYTQKSLSLSP

SEQ ID NO: 279 - protein, 5 aa, Artificial Sequence
  Synthetic
HHHHH

SEQ ID NO: 280 - protein, 6 aa, Artificial Sequence
  Synthetic
HHHHHH

SEQ ID NO: 281 - protein, 502 aa, Artificial Sequence
  Synthetic
QVQLVQSGAEVKKPGASVKVSCKASGYTFTGYYMHWVRQAPGQCLEWMGWINPNSGGTKYAQKFQGRVTMTRDTSISTAYMELSRLRSDDTAVYYCARDRITVAGTYYYYGMDVWGQGTTVTVSSGGGGSGGGGSGGGGSDIQMTQSPSSVSASVGDRVTITCRASQGVNNWLAWYQQKPGKAPKLLIYTASSLQSGVPSRFSGSGSGTDFTLTIRSLQPEDFATYYCQQANSFPITFGCGTRLEIKSGGGGSEVQLVESGGGLVQPGGSLKLSCAASGFTFNKYAMNWVRQAPGKGLEWVARIRSKYNNYATYYADSVKDRFTISRDDSKNTAYLQMNNLKTEDTAVYYCVRHGNFGNSYISYWAYWGQGTLVTVSSGGGGSGGGGSGGGGSQTVVTQEPSLTVSPGGTVTLTCGSSTGAVTSGNYPNWVQQKPGQAPRGLIGGTKFLAPGTPARFSGSLLGGKAALTLSGVQPEDEAEYYCVLWYSNRWVFGGGTKLTVL

SEQ ID NO: 282 - protein, 502 aa, Artificial Sequence
  Synthetic
QVQMVQSGAEVKKHGASVKVSCKASGYTFTGYYMHWVRQAPGQCLEWMGWINPNSGGTKYAQKFQGRVTMTRDTSISTAYMELSRLRSDDTAVYYCARDRITVAGTYYYYGMDVWGQGTTVTVSSGGGGSGGGGSGGGGSDIQMTQSPSSVSASVGDRVTITCRASQGVNNWLAWYQQKPGKAPKLLIYTASSLQSGVPSRFSGSGSGTDFTLTIRSLQPEDFATYYCQQANSFPITFGCGTRLEIKSGGGGSEVQLVESGGGLVQPGGSLKLSCAASGFTFNKYAMNWVRQAPGKGLEWVARIRSKYNNYATYYADSVKDRFTISRDDSKNTAYLQMNNLKTEDTAVYYCVRHGNFGNSYISYWAYWGQGTLVTVSSGGGGSGGGGSGGGGSQTVVTQEPSLTVSPGGTVTLTCGSSTGAVTSGNYPNWVQQKPGQAPRGLIGGTKFLAPGTPARFSGSLLGGKAALTLSGVQPEDEAEYYCVLWYSNRWVFGGGTKLTVL

SEQ ID NO: 283 - protein, 508 aa, Artificial Sequence
  Synthetic
QVQLVQSGAEVKKPGASVKVSCKASGYTFTGYYMHWVRQAPGQCLEWMGWINPNSGGTKYAQKFQGRVTMTRDTSISTAYMELSRLRSDDTAVYYCARDRITVAGTYYYYGMDVWGQGTTVTVSSGGGGSGGGGSGGGGSDIQMTQSPSSVSASVGDRVTITCRASQGVNNWLAWYQQKPGKAPKLLIYTASSLQSGVPSRFSGSGSGTDFTLTIRSLQPEDFATYYCQQANSFPITFGCGTRLEIKSGGGGSEVQLVESGGGLVQPGGSLKLSCAASGFTFNKYAMNWVRQAPGKGLEWVARIRSKYNNYATYYADSVKDRFTISRDDSKNTAYLQMNNLKTEDTAVYYCVRHGNFGNSYISYWAYWGQGTLVTVSSGGGGSGGGGSGGGGSQTVVTQEPSLTVSPGGTVTLTCGSSTGAVTSGNYPNWVQQKPGQAPRGLIGGTKFLAPGTPARFSGSLLGGKAALTLSGVQPEDEAEYYCVLWYSNRWVFGGGTKLTVLHHHHHH

SEQ ID NO: 284 - protein, 508 aa, Artificial Sequence
  Synthetic
QVQMVQSGAEVKKHGASVKVSCKASGYTFTGYYMHWVRQAPGQCLEWMGWINPNSGGTKYAQKFQGRVTMTRDTSISTAYMELSRLRSDDTAVYYCARDRITVAGTYYYYGMDVWGQGTTVTVSSGGGGSGGGGSGGGGSDIQMTQSPSSVSASVGDRVTITCRASQGVNNWLAWYQQKPGKAPKLLIYTASSLQSGVPSRFSGSGSGTDFTLTIRSLQPEDFATYYCQQANSFPITFGCGTRLEIKSGGGGSEVQLVESGGGLVQPGGSLKLSCAASGFTFNKYAMNWVRQAPGKGLEWVARIRSKYNNYATYYADSVKDRFTISRDDSKNTAYLQMNNLKTEDTAVYYCVRHGNFGNSYISYWAYWGQGTLVTVSSGGGGSGGGGSGGGGSQTVVTQEPSLTVSPGGTVTLTCGSSTGAVTSGNYPNWVQQKPGQAPRGLIGGTKFLAPGTPARFSGSLLGGKAALTLSGVQPEDEAEYYCVLWYSNRWVFGGGTKLTVLHHHHHH

SEQ ID NO: 285 - protein, 6 aa, Artificial Sequence
  Synthetic
DTYRYI

SEQ ID NO: 286 - protein, 6 aa, Artificial Sequence
  Synthetic
TDFYLK

SEQ ID NO: 287 - protein, 11 aa, Artificial Sequence
  Synthetic
MASMTGGQQMG

SEQ ID NO: 288 - protein, 14 aa, Artificial Sequence
  Synthetic
GKPIPNPLLGLDST

SEQ ID NO: 289 - protein, 6 aa, Artificial Sequence
  Synthetic
QYPALT

SEQ ID NO: 290 - protein, 10 aa, Artificial Sequence
  Synthetic
SSTSSDFRDR

SEQ ID NO: 291 - protein, 7 aa, Artificial Sequence
  Synthetic
DYKDDDK

SEQ ID NO: 292 - protein, 6 aa, Artificial Sequence
  Synthetic
EYMPME

SEQ ID NO: 293 - protein, 6 aa, Artificial Sequence
  Synthetic
EFMPME

SEQ ID NO: 294 - protein, 19 aa, Artificial Sequence
  Synthetic
KDHLIHNVHKEFHAHAHNK

SEQ ID NO: 295 - protein, 8 aa, Artificial Sequence
  Synthetic
QPELAPED

SEQ ID NO: 296 - protein, 11 aa, Artificial Sequence
  Synthetic
KPPTPPPEPET

SEQ ID NO: 297 - protein, 11 aa, Artificial Sequence
  Synthetic
CEQKLISEEDL

SEQ ID NO: 298 - protein, 7 aa, Artificial Sequence
  Synthetic
HHHHHHH

SEQ ID NO: 299 - protein, 8 aa, Artificial Sequence
  Synthetic
HHHHHHHH

SEQ ID NO: 300 - protein, 9 aa, Artificial Sequence
  Synthetic
NANNPDWDF

SEQ ID NO: 301 - protein, 15 aa, Artificial Sequence
  Synthetic
KETAAAKFERQHMDS

SEQ ID NO: 302 - protein, 8 aa, Artificial Sequence
  Synthetic
WSHPQFEK

SEQ ID NO: 303 - protein, 9 aa, Artificial Sequence
  Synthetic
AWAHPQPGG

SEQ ID NO: 304 - protein, 6 aa, Artificial Sequence
  Synthetic
HTTPHH

SEQ ID NO: 305 - protein, 11 aa, Artificial Sequence
  Synthetic
YTDIEMNRLGK

SEQ ID NO: 306 - protein, 12 aa, Artificial Sequence
  Synthetic
EDQVDPRLIDGK

SEQ ID NO: 307 - protein, 498 aa, Artificial Sequence
  Synthetic
DIQLTQSPASLAVSLGQRATISCKASQSVDYDGDSYLNWYQQIPGQPPKLLIYDASNLVSGIPPRFSGSGSGTDFTLNIHPVEKVDAATYHCQQSTEDPWTFGGGTKLEIKGGGGSGGGGSGGGGSQVQLQQSGAELVRPGSSVKISCKASGYAFSSYWMNWVKQRPGQGLEWIGQIWPGDGDTNYNGKFKGKATLTADESSSTAYMQLSSLASEDSAVYFCARRETTTVGRYYYAMDYWGQGTTVTVSSGGGGSDIKLQQSGAELARPGASVKMSCKTSGYTFTRYTMHWVKQRPGQGLEWIGYINPSRGYTNYNQKFKDKATLTTDKSSSTAYMQLSSLTSEDSAVYYCARYYDDHYCLDYWGQGTTLTVSSVEGGSGGSGGSGGSGGVDDIQLTQSPAIMSASPGEKVTMTCRASSSVSYMNWYQQKSGTSPKRWIYDTSKVASGVPYRFSGSGSGTSYSLTISSMEAEDAATYYCQQWSSNPLTFGAGTKLELK

SEQ ID NO: 308 - protein, 124 aa, Artificial Sequence
  Synthetic
QVQLQQSGAELVRPGSSVKISCKASGYAFSSYWMNWVKQRPGQGLEWIGQIWPGDGDTNYNGKFKGKATLTADESSSTAYMQLSSLASEDSAVYFCARRETTTVGRYYYAMDYWGQGTTVTVSS

SEQ ID NO: 309 - protein, 111 aa, Artificial Sequence
  Synthetic
DIQLTQSPASLAVSLGQRATISCKASQSVDYDGDSYLNWYQQIPGQPPKLLIYDASNLVSGIPPRFSGSGSGTDFTLNIHPVEKVDAATYHCQQSTEDPWTFGGGTKLEIK

SEQ ID NO: 310 - protein, 5 aa, Artificial Sequence
  Synthetic
SYWMN

SEQ ID NO: 311 - protein, 10 aa, Artificial Sequence
  Synthetic
GYAFSSYWMN

SEQ ID NO: 312 - protein, 17 aa, Artificial Sequence
  Synthetic
QIWPGDGDTNYNGKFKG

SEQ ID NO: 313 - protein, 15 aa, Artificial Sequence
  Synthetic
RETTTVGRYYYAMDY

SEQ ID NO: 314 - protein, 15 aa, Artificial Sequence
  Synthetic
KASQSVDYDGDSYLN

SEQ ID NO: 315 - protein, 7 aa, Artificial Sequence
  Synthetic
DASNLVS

SEQ ID NO: 316 - protein, 9 aa, Artificial Sequence
  Synthetic
QQSTEDPWT

SEQ ID NO: 317 - protein, 17 aa, Artificial Sequence
  Synthetic
KSSQSVLDSSTNKNSLA

SEQ ID NO: 318 - protein, 7 aa, Artificial Sequence
  Synthetic
WASTRES

SEQ ID NO: 319 - protein, 9 aa, Artificial Sequence
  Synthetic
QQSAHFPIT

SEQ ID NO: 320 - protein, 17 aa, Artificial Sequence
  Synthetic
KSSQSVLDSSKNKNSLA

SEQ ID NO: 321 - protein, 6 aa, Artificial Sequence
  Synthetic
WASTRE

SEQ ID NO: 322 - protein, 17 aa, Artificial Sequence
  Synthetic
KSSQSVLDSSNNKNSLA

SEQ ID NO: 323 - protein, 5 aa, Artificial Sequence
  Synthetic
NYGMN

SEQ ID NO: 324 - protein, 17 aa, Artificial Sequence
  Synthetic
WINTYTGEPTYADKFQG

SEQ ID NO: 325 - protein, 13 aa, Artificial Sequence
  Synthetic
WSWSDGYYVYFDY

SEQ ID NO: 326 - protein, 17 aa, Artificial Sequence
  Synthetic
WINTYTGEPTYADDFKG

SEQ ID NO: 327 - protein, 17 aa, Artificial Sequence
  Synthetic
WINTYTGETNYADKFQG

SEQ ID NO: 328 - protein, 113 aa, Artificial Sequence
  Synthetic
DIVMTQSPDSLTVSLGERTTINCKSSQSVLDSSTNKNSLAWYQQKPGQPPKLLLSWASTRESGIPDRFSGSGSGTDFTLTIDSPQPEDSATYYCQQSAHFPITFGQGTRLEIK

SEQ ID NO: 329 - protein, 113 aa, Artificial Sequence
  Synthetic
DIVMTQSPDSLTVSLGERTTINCKSSQSVLDSSKNKNSLAWYQQKPGQPPKLLLSWASTRESGIPDRFSGSGSGTDFTLTIDSLQPEDSATYYCQQSAHFPITFGQGTRLEIK

SEQ ID NO: 330 - protein, 113 aa, Artificial Sequence
  Synthetic
DIVMTQSPDSMTVSLGERTTINCKSSQSVLDSSTNKNSLAWYQQKPGQPPKLLLSWASTRESGIPDRFSGSGSGTDFTLTIDSLQPEDSATYYCQQSAHFPITFGQGTRLDIK

SEQ ID NO: 331 - protein, 113 aa, Artificial Sequence
  Synthetic
DIVMTQSPDSLSVSLGERTTINCKSSQSVLDSSTNKNSLAWYQQKPGQPPKLLLSWASTRESGIPDRFSGSGSGTDFTLTIDSLQPEDSATYYCQQSAHFPITFGQGTRLEIK

SEQ ID NO: 332 - protein, 113 aa, Artificial Sequence
  Synthetic
DIVMTQSPDSLTVSLGERTTINCKSSQSVLDSSNNKNSLAWYQQKPGQPPKLLLSWASTRESGIPDRFSGSGSGTDFTLTIDGLQPEDSATYYCQQSAHFPITFGQGTRLEIK

SEQ ID NO: 333 - protein, 122 aa, Artificial Sequence
  Synthetic
QVQLVQSGAEVKKPGESVKVSCKASGYTFTNYGMNWVKQAPGQGLEWMGWINTYTGEPTYADKFQGRVTMTTDTSTSTAYMEIRNLGGDDTAVYYCARWSWSDGYYVYFDYWGQGTSVTVSS

SEQ ID NO: 334 - protein, 122 aa, Artificial Sequence
  Synthetic
QVQLVQSGAEVKKPGESVKVSCKASGYTFTNYGMNWVRQAPGQGLEWMGWINTYTGEPTYADDFKGRVTMSSDTSTSTAYLEINSLRSDDTAIYYCARWSWSDGYYVYFDYWGQGTTVTVSS

SEQ ID NO: 335 - protein, 122 aa, Artificial Sequence
  Synthetic
QVQLVQSGAEVKKPGESVKVSCKASGYTFTNYGMNWVKQAPGQGLKWMGWINTYTGEPTYADDFKGRVTMTTDTSTSTAYMEIRNLRNDDTAVYYCARWSWSDGYYVYFDYWGQGTTVTVSS

SEQ ID NO: 336 - protein, 122 aa, Artificial Sequence; identical to SEQ ID NO: 335
  Synthetic

SEQ ID NO: 337 - protein, 122 aa, Artificial Sequence
  Synthetic
QVQLVQSGAEVKKPGESVKVSCKASGYTFTNYGMNWVKQAPGQGLKWMGWINTYTGEPTYADDFKGRVTMTSDTSTSTAYMEISSLRSDDTAVYYCARWSWSDGYYVYFDYWGQGTTVTVSS

SEQ ID NO: 338 - protein, 122 aa, Artificial Sequence
  Synthetic
QVQLVQSGAEVKKPGESVKVSCKASGYTFTNYGMNWVKQAPGQGLEWMGWINTYTGETNYADKFQGRVTFTSDTSTSTAYMELRNLKSDDTAVYYCARWSWSDGYYVYFDYWGQGTTVTVSS

SEQ ID NO: 339 - protein, 122 aa, Artificial Sequence
  Synthetic
QVQLVQSGAEVKKPGESVKVSCKASGYTFTNYGMNWVKQAPGQGLEWMGWINTYTGEPTYADKFQGRVTMTTDTSTSTAYMEIRNLRSDDTAVYYCARWSWSDGYYVYFDYWGQGTTVTVSS

SEQ ID NO: 340 - protein, 364 aa, Homo Sapiens
MPLLLLLPLLWAGALAMDPNFWLQVQESVTVQEGLCVLVPCTFFHPIPYYDKNSPVHGYWFREGAIISRDSPVATNKLDQEVQEETQGRFRLLGDPSRNNCSLSIVDARRRDNGSYFFRMERGSTKYSYKSPQLSVHVTDLTHRPKILIPGTLEPGHSKNLTCSVSWACEQGTPPIFSWLSAAPTSLGPRTTHSSVLIITPRPQDHGTNLTCQVKFAGAGVTTERTIQLNVTYVPQNPTTGIFPGDGSGKQETRAGVVHGAIGGAGVTALLALCLCLIFFIVKTHRRKAARTAVGRNDTHPTTGSASPKHQKKSKLHGPTETSSCSGAAPTVEMDEELHYASLNFHGMNPSKDTSTEYSEVRTQ

SEQ ID NO: 341 - protein, 7 aa, Artificial Sequence
  Synthetic
NARMGVS

SEQ ID NO: 342 - protein, 16 aa, Artificial Sequence
  Synthetic
HIFSNAEKSYRTSLKS

SEQ ID NO: 343 - protein, 17 aa, Artificial Sequence
  Synthetic
IPGYGGNGDYHYYGMDV

SEQ ID NO: 344 - protein, 11 aa, Artificial Sequence
  Synthetic
RASQGIRNDLG

SEQ ID NO: 345 - protein, 7 aa, Artificial Sequence
  Synthetic
ASSTLQS

SEQ ID NO: 346 - protein, 9 aa, Artificial Sequence
  Synthetic
LQHNNFPWT

SEQ ID NO: 347 - protein, 127 aa, Artificial Sequence
  Synthetic
QVTLKESGPVLVKPTETLTLTCTVSGFSLINARMGVSWIRQPPGKALEWLAHIFSNAEKSYRTSLKSRLTISKDTSKSQVVLTMTNMDPVDTATYYCARIPGYGGNGDYHYYGMDVWGQGTTVTVSS

SEQ ID NO: 348 - protein, 107 aa, Artificial Sequence
  Synthetic
DIQMTQSPSSLSASLGDRVTITCRASQGIRNDLGWYQQKPGKAPKRLIYASSTLQSGVPSRFSGSGSGTEFTLTISSLQPEDFATYYCLQHNNFPWTFGQGTKVEIK

SEQ ID NO: 349 - protein, 249 aa, Artificial Sequence
  Synthetic
QVTLKESGPVLVKPTETLTLTCTVSGFSLINARMGVSWIRQPPGKALEWLAHIFSNAEKSYRTSLKSRLTISKDTSKSQVVLTMTNMDPVDTATYYCARIPGYGGNGDYHYYGMDVWGQGTTVTVSSGGGGSGGGGSGGGGSDIQMTQSPSSLSASLGDRVTITCRASQGIRNDLGWYQQKPGKAPKRLIYASSTLQSGVPSRFSGSGSGTEFTLTISSLQPEDFATYYCLQHNNFPWTFGQGTKVEIK

SEQ ID NO: 350 - protein, 504 aa, Artificial Sequence
  Synthetic
QVTLKESGPVLVKPTETLTLTCTVSGFSLINARMGVSWIRQPPGKALEWLAHIFSNAEKSYRTSLKSRLTISKDTSKSQVVLTMTNMDPVDTATYYCARIPGYGGNGDYHYYGMDVWGQGTTVTVSSGGGGSGGGGSGGGGSDIQMTQSPSSLSASLGDRVTITCRASQGIRNDLGWYQQKPGKAPKRLIYASSTLQSGVPSRFSGSGSGTEFTLTISSLQPEDFATYYCLQHNNFPWTFGQGTKVEIKSGGGGSEVQLVESGGGLVQPGGSLKLSCAASGFTFNKYAMNWVRQAPGKGLEWVARIRSKYNNYATYYADSVKDRFTISRDDSKNTAYLQMNNLKTEDTAVYYCVRHGNFGNSYISYWAYWGQGTLVTVSSGGGGSGGGGSGGGGSQTVVTQEPSLTVSPGGTVTLTCGSSTGAVTSGNYPNWVQQKPGQAPRGLIGGTKFLAPGTPARFSGSLLGGKAALTLSGVQPEDEAEYYCVLWYSNRWVFGGGTKLTVL

SEQ ID NO: 351 - protein, 7 aa, Artificial Sequence
  Synthetic
NARMGVS

SEQ ID NO: 352 - protein, 16 aa, Artificial Sequence
  Synthetic
HIFSNDEKTYSTSLKS

SEQ ID NO: 353 - protein, 15 aa, Artificial Sequence
  Synthetic
IPYYGSGSHNYGMDV

SEQ ID NO: 354 - protein, 11 aa, Artificial Sequence
  Synthetic
RASQDIRNDFG

SEQ ID NO: 355 - protein, 7 aa, Artificial Sequence
  Synthetic
AASTLQS

SEQ ID NO: 356 - protein, 9 aa, Artificial Sequence
  Synthetic
LQYNTYPWT

SEQ ID NO: 357 - protein, 125 aa, Artificial Sequence
  Synthetic
QVTLKESGPVLVKPTETLTLTCTVSGFSLRNARMGVSWIRQPPGKALEWLAHIFSNDEKTYSTSLKSRLTISRDTSKGQVVLTMTKMDPVDTATYYCARIPYYGSGSHNYGMDVWGQGTTVTVSS

SEQ ID NO: 358 - protein, 107 aa, Artificial Sequence
  Synthetic
DIQMTQSPSSLSASVGDRVTITCRASQDIRNDFGWYQQKPGKAPQRLLYAASTLQSGVPSRFSGSGSGTEFTLTISSLQPEDFATYYCLQYNTYPWTFGQGTKVEIK

SEQ ID NO: 359 - protein, 247 aa, Artificial Sequence
  Synthetic
QVTLKESGPVLVKPTETLTLTCTVSGFSLRNARMGVSWIRQPPGKALEWLAHIFSNDEKTYSTSLKSRLTISRDTSKGQVVLTMTKMDPVDTATYYCARIPYYGSGSHNYGMDVWGQGTTVTVSSGGGGSGGGGSGGGGSDIQMTQSPSSLSASVGDRVTITCRASQDIRNDFGWYQQKPGKAPQRLLYAASTLQSGVPSRFSGSGSGTEFTLTISSLQPEDFATYYCLQYNTYPWTFGQGTKVEIK

SEQ ID NO: 360 - protein, 502 aa, Artificial Sequence
  Synthetic
QVTLKESGPVLVKPTETLTLTCTVSGFSLRNARMGVSWIRQPPGKALEWLAHIFSNDEKTYSTSLKSRLTISRDTSKGQVVLTMTKMDPVDTATYYCARIPYYGSGSHNYGMDVWGQGTTVTVSSGGGGSGGGGSGGGGSDIQMTQSPSSLSASVGDRVTITCRASQDIRNDFGWYQQKPGKAPQRLLYAASTLQSGVPSRFSGSGSGTEFTLTISSLQPEDFATYYCLQYNTYPWTFGQGTKVEIKSGGGGSEVQLVESGGGLVQPGGSLKLSCAASGFTFNKYAMNWVRQAPGKGLEWVARIRSKYNNYATYYADSVKDRFTISRDDSKNTAYLQMNNLKTEDTAVYYCVRHGNFGNSYISYWAYWGQGTLVTVSSGGGGSGGGGSGGGGSQTVVTQEPSLTVSPGGTVTLTCGSSTGAVTSGNYPNWVQQKPGQAPRGLIGGTKFLAPGTPARFSGSLLGGKAALTLSGVQPEDEAEYYCVLWYSNRWVFGGGTKLTVL

SEQ ID NO: 361 - protein, 7 aa, Artificial Sequence
  Synthetic
NARMAVS

SEQ ID NO: 362 - protein, 16 aa, Artificial Sequence
  Synthetic
HIFSNGEKSYSTSLKS

SEQ ID NO: 363 - protein, 13 aa, Artificial Sequence
  Synthetic
IVGYSDWLLPFDH

SEQ ID NO: 364 - protein, 11 aa, Artificial Sequence
  Synthetic
RASQNINRFLN

SEQ ID NO: 365 - protein, 7 aa, Artificial Sequence
  Synthetic
AASSLQS

SEQ ID NO: 366 - protein, 9 aa, Artificial Sequence
  Synthetic
LQHNSYPWT

SEQ ID NO: 367 - protein, 123 aa, Artificial Sequence
  Synthetic
QVTLKESGPALVKPTETLTLTCTVSGFSLSNARMAVSWIRQPPGKALEWLAHIFSNGEKSYSTSLKSRLTISKDTSKTQVVLTMTNTDPVDTATYFCARIVGYSDWLLPFDHWGQGIMVTVSS

SEQ ID NO: 368 - protein, 107 aa, Artificial Sequence
  Synthetic
DIQMTQSPSSLSASVGDRVTITCRASQNINRFLNWYQQKPGKAPKLLIYAASSLQSGVPSRFSGSGSGTDFTLTISSLQPEDFATYYCLQHNSYPWTFGQGTKVDIK

SEQ ID NO: 369 - protein, 245 aa, Artificial Sequence
  Synthetic
QVTLKESGPALVKPTETLTLTCTVSGFSLSNARMAVSWIRQPPGKALEWLAHIFSNGEKSYSTSLKSRLTISKDTSKTQVVLTMTNTDPVDTATYFCARIVGYSDWLLPFDHWGQGIMVTVSSGGGGSGGGGSGGGGSDIQMTQSPSSLSASVGDRVTITCRASQNINRFLNWYQQKPGKAPKLLIYAASSLQSGVPSRFSGSGSGTDFTLTISSLQPEDFATYYCLQHNSYPWTFGQGTKVDIK

SEQ ID NO: 370 - protein, 500 aa, Artificial Sequence
  Synthetic
QVTLKESGPALVKPTETLTLTCTVSGFSLSNARMAVSWIRQPPGKALEWLAHIFSNGEKSYSTSLKSRLTISKDTSKTQVVLTMTNTDPVDTATYFCARIVGYSDWLLPFDHWGQGIMVTVSSGGGGSGGGGSGGGGSDIQMTQSPSSLSASVGDRVTITCRASQNINRFLNWYQQKPGKAPKLLIYAASSLQSGVPSRFSGSGSGTDFTLTISSLQPEDFATYYCLQHNSYPWTFGQGTKVDIKSGGGGSEVQLVESGGGLVQPGGSLKLSCAASGFTFNKYAMNWVRQAPGKGLEWVARIRSKYNNYATYYADSVKDRFTISRDDSKNTAYLQMNNLKTEDTAVYYCVRHGNFGNSYISYWAYWGQGTLVTVSSGGGGSGGGGSGGGGSQTVVTQEPSLTVSPGGTVTLTCGSSTGAVTSGNYPNWVQQKPGQAPRGLIGGTKFLAPGTPARFSGSLLGGKAALTLSGVQPEDEAEYYCVLWYSNRWVFGGGTKLTVL

SEQ ID NO: 371 - protein, 7 aa, Artificial Sequence
  Synthetic
NAKMGVS

SEQ ID NO: 372 - protein, 16 aa, Artificial Sequence
  Synthetic
HIFSNDEKSYSTSLKS

SEQ ID NO: 373 - protein, 14 aa, Artificial Sequence
  Synthetic
IVGYGSGWYGYFDY

SEQ ID NO: 374 - protein, 11 aa, Artificial Sequence
  Synthetic
RASQDIRDDLG

SEQ ID NO: 375 - protein, 7 aa, Artificial Sequence
  Synthetic
GASTLQS

SEQ ID NO: 376 - protein, 9 aa, Artificial Sequence
  Synthetic
LQHNSYPLT

SEQ ID NO: 377 - protein, 124 aa, Artificial Sequence
  Synthetic
QVTLKESGPALVKPTETLTLTCTLSGFSLNNAKMGVSWIRQPPGKALEWLAHIFSNDEKSYSTSLKSRLTISKDTSKGQVVLTMTNMDPVDTATYYCARIVGYGSGWYGYFDYWGQGTLVTVSS

SEQ ID NO: 378 - protein, 107 aa, Artificial Sequence
  Synthetic
DIQMTQSPSSLSASVGDRVTITCRASQDIRDDLGWYQQKPGNAPKRLIYGASTLQSGVPSRFSGSGSGTEFTLTISSLQPEDFATYYCLQHNSYPLTFGGGTKVDIK

SEQ ID NO: 379 - protein, 246 aa, Artificial Sequence
  Synthetic
QVTLKESGPALVKPTETLTLTCTLSGFSLNNAKMGVSWIRQPPGKALEWLAHIFSNDEKSYSTSLKSRLTISKDTSKGQVVLTMTNMDPVDTATYYCARIVGYGSGWYGYFDYWGQGTLVTVSSGGGGSGGGGSGGGGSDIQMTQSPSSLSASVGDRVTITCRASQDIRDDLGWYQQKPGNAPKRLIYGASTLQSGVPSRFSGSGSGTEFTLTISSLQPEDFATYYCLQHNSYPLTFGGGTKVDIK

SEQ ID NO: 380 - protein, 501 aa, Artificial Sequence
  Synthetic
QVTLKESGPALVKPTETLTLTCTLSGFSLNNAKMGVSWIRQPPGKALEWLAHIFSNDEKSYSTSLKSRLTISKDTSKGQVVLTMTNMDPVDTATYYCARIVGYGSGWYGYFDYWGQGTLVTVSSGGGGSGGGGSGGGGSDIQMTQSPSSLSASVGDRVTITCRASQDIRDDLGWYQQKPGNAPKRLIYGASTLQSGVPSRFSGSGSGTEFTLTISSLQPEDFATYYCLQHNSYPLTFGGGTKVDIKSGGGGSEVQLVESGGGLVQPGGSLKLSCAASGFTFNKYAMNWVRQAPGKGLEWVARIRSKYNNYATYYADSVKDRFTISRDDSKNTAYLQMNNLKTEDTAVYYCVRHGNFGNSYISYWAYWGQGTLVTVSSGGGGSGGGGSGGGGSQTVVTQEPSLTVSPGGTVTLTCGSSTGAVTSGNYPNWVQQKPGQAPRGLIGGTKFLAPGTPARFSGSLLGGKAALTLSGVQPEDEAEYYCVLWYSNRWVFGGGTKLTVL

SEQ ID NO: 381 - protein, 7 aa, Artificial Sequence
  Synthetic
NARMGVS

SEQ ID NO: 382 - protein, 16 aa, Artificial Sequence
  Synthetic
HIFWNDEKSYSTSLKS

SEQ ID NO: 383 - protein, 15 aa, Artificial Sequence
  Synthetic
IPYYGSGSYNYGMDV

SEQ ID NO: 384 - protein, 11 aa, Artificial Sequence
  Synthetic
RASQGIRNDLG

SEQ ID NO: 385 - protein, 7 aa, Artificial Sequence
  Synthetic
AASSLQS

SEQ ID NO: 386 - protein, 9 aa, Artificial Sequence
  Synthetic
LQHNTYPLT

SEQ ID NO: 387 - protein, 125 aa, Artificial Sequence
  Synthetic
QVTLKESGPMLVKPTETLTLTCTFSGFSLRNARMGVSWIRQPPGKALEWLAHIFWNDEKSYSTSLKSRLTISKDTSKSQVVLTMTNMDPVDTATYYCARIPYYGSGSYNYGMDVWGQGTTVTVSS

SEQ ID NO: 388 - protein, 107 aa, Artificial Sequence
  Synthetic
DIQMTQSPSSLSASVGDRVTITCRASQGIRNDLGWYQQKPGKAPKRLIYAASSLQSGVPSRFSGSGSGTEFTLTISSLQPEDFATYYCLQHNTYPLTFGGGTKVDIK

SEQ ID NO: 389 - protein, 247 aa, Artificial Sequence
  Synthetic
QVTLKESGPMLVKPTETLTLTCTFSGFSLRNARMGVSWIRQPPGKALEWLAHIFWNDEKSYSTSLKSRLTISKDTSKSQVVLTMTNMDPVDTATYYCARIPYYGSGSYNYGMDVWGQGTTVTVSSGGGGSGGGGSGGGGSDIQMTQSPSSLSASVGDRVTITCRASQGIRNDLGWYQQKPGKAPKRLIYAASSLQSGVPSRFSGSGSGTEFTLTISSLQPEDFATYYCLQHNTYPLTFGGGTKVDIK

SEQ ID NO: 390 - protein, 502 aa, Artificial Sequence
  Synthetic
QVTLKESGPMLVKPTETLTLTCTFSGFSLRNARMGVSWIRQPPGKALEWLAHIFWNDEKSYSTSLKSRLTISKDTSKSQVVLTMTNMDPVDTATYYCARIPYYGSGSYNYGMDVWGQGTTVTVSSGGGGSGGGGSGGGGSDIQMTQSPSSLSASVGDRVTITCRASQGIRNDLGWYQQKPGKAPKRLIYAASSLQSGVPSRFSGSGSGTEFTLTISSLQPEDFATYYCLQHNTYPLTFGGGTKVDIKSGGGGSEVQLVESGGGLVQPGGSLKLSCAASGFTFNKYAMNWVRQAPGKGLEWVARIRSKYNNYATYYADSVKDRFTISRDDSKNTAYLQMNNLKTEDTAVYYCVRHGNFGNSYISYWAYWGQGTLVTVSSGGGGSGGGGSGGGGSQTVVTQEPSLTVSPGGTVTLTCGSSTGAVTSGNYPNWVQQKPGQAPRGLIGGTKFLAPGTPARFSGSLLGGKAALTLSGVQPEDEAEYYCVLWYSNRWVFGGGTKLTVL

SEQ ID NO: 391 - protein, 7 aa, Artificial Sequence
  Synthetic
NARMAVS

SEQ ID NO: 392 - protein, 16 aa, Artificial Sequence
  Synthetic
HIFSNDEKSYSPSLKS

SEQ ID NO: 393 - protein, 14 aa, Artificial Sequence
  Synthetic
IVGYGTGWYGFFDY

SEQ ID NO: 394 - protein, 11 aa, Artificial Sequence
  Synthetic
RASQGIRNDLG

SEQ ID NO: 395 - protein, 7 aa, Artificial Sequence
  Synthetic
AASVLQS

SEQ ID NO: 396 - protein, 9 aa, Artificial Sequence
  Synthetic
LQHNSYPLT

SEQ ID NO: 397 - protein, 124 aa, Artificial Sequence
  Synthetic
QVTLKESGPTLVKPTETLTLTCTLSGFSLNNARMAVSWIRQPPGKTLEWLAHIFSNDEKSYSPSLKSRLTISKDTSKSQVVLTMTNMDPEDTATYYCARIVGYGTGWYGFFDYWGQGILVTVSS

SEQ ID NO: 398 - protein, 107 aa, Artificial Sequence
  Synthetic
DIQMTQSPSSLSASVGDRVTITCRASQGIRNDLGWFQQKPGKAPKRLIYAASVLQSGVPSRFSGSGSGTEFTLTISSLQPEDFATYYCLQHNSYPLTFGGGTKVDIK

SEQ ID NO: 399 - protein, 246 aa, Artificial Sequence
  Synthetic
QVTLKESGPTLVKPTETLTLTCTLSGFSLNNARMAVSWIRQPPGKTLEWLAHIFSNDEKSYSPSLKSRLTISKDTSKSQVVLTMTNMDPEDTATYYCARIVGYGTGWYGFFDYWGQGILVTVSSGGGGSGGGGSGGGGSDIQMTQSPSSLSASVGDRVTITCRASQGIRNDLGWFQQKPGKAPKRLIYAASVLQSGVPSRFSGSGSGTEFTLTISSLQPEDFATYYCLQHNSYPLTFGGGTKVDIK

SEQ ID NO: 400 - protein, 501 aa, Artificial Sequence
  Synthetic
QVTLKESGPTLVKPTETLTLTCTLSGFSLNNARMAVSWIRQPPGKTLEWLAHIFSNDEKSYSPSLKSRLTISKDTSKSQVVLTMTNMDPEDTATYYCARIVGYGTGWYGFFDYWGQGILVTVSSGGGGSGGGGSGGGGSDIQMTQSPSSLSASVGDRVTITCRASQGIRNDLGWFQQKPGKAPKRLIYAASVLQSGVPSRFSGSGSGTEFTLTISSLQPEDFATYYCLQHNSYPLTFGGGTKVDIKSGGGGSEVQLVESGGGLVQPGGSLKLSCAASGFTFNKYAMNWVRQAPGKGLEWVARIRSKYNNYATYYADSVKDRFTISRDDSKNTAYLQMNNLKTEDTAVYYCVRHGNFGNSYISYWAYWGQGTLVTVSSGGGGSGGGGSGGGGSQTVVTQEPSLTVSPGGTVTLTCGSSTGAVTSGNYPNWVQQKPGQAPRGLIGGTKFLAPGTPARFSGSLLGGKAALTLSGVQPEDEAEYYCVLWYSNRWVFGGGTKLTVL

SEQ ID NO: 401 - protein, 7 aa, Artificial Sequence
  Synthetic
NARMGVS

SEQ ID NO: 402 - protein, 16 aa, Artificial Sequence
  Synthetic
HIFSNDEKSYSTSLKN

SEQ ID NO: 403 - protein, 14 aa, Artificial Sequence
  Synthetic
IVGYGTGWFGYFDY

SEQ ID NO: 404 - protein, 11 aa, Artificial Sequence
  Synthetic
RASQDIRTDLA

SEQ ID NO: 405 - protein, 7 aa, Artificial Sequence
  Synthetic
AASSLQS

SEQ ID NO: 406 - protein, 9 aa, Artificial Sequence
  Synthetic
LQHNRYPLT

SEQ ID NO: 407 - protein, 124 aa, Artificial Sequence
  Synthetic
QVTLKESGPTLVKPTETLTLTCTVSGFSLNNARMGVSWIRQPPGKALEWLAHIFSNDEKSYSTSLKNRLTISKDSSKTQVVLTMTNVDPVDTATYYCARIVGYGTGWFGYFDYWGQGTQVTVSS

SEQ ID NO: 408 - protein, 107 aa, Artificial Sequence
  Synthetic
DIQMTQSPSSLSASVGDRVTITCRASQDIRTDLAWYQQKPGKAPKRLIYAASSLQSGVPSRFSGSGSGTEFTLTISSLQPEDFATYYCLQHNRYPLTFGGGTKVDIK

SEQ ID NO: 409 - protein, 246 aa, Artificial Sequence
  Synthetic
QVTLKESGPTLVKPTETLTLTCTVSGFSLNNARMGVSWIRQPPGKALEWLAHIFSNDEKSYSTSLKNRLTISKDSSKTQVVLTMTNVDPVDTATYYCARIVGYGTGWFGYFDYWGQGTQVTVSSGGGGSGGGGSGGGGSDIQMTQSPSSLSASVGDRVTITCRASQDIRTDLAWYQQKPGKAPKRLIYAASSLQSGVPSRFSGSGSGTEFTLTISSLQPEDFATYYCLQHNRYPLTFGGGTKVDIK

SEQ ID NO: 410 - protein, 501 aa, Artificial Sequence
  Synthetic
QVTLKESGPTLVKPTETLTLTCTVSGFSLNNARMGVSWIRQPPGKALEWLAHIFSNDEKSYSTSLKNRLTISKDSSKTQVVLTMTNVDPVDTATYYCARIVGYGTGWFGYFDYWGQGTQVTVSSGGGGSGGGGSGGGGSDIQMTQSPSSLSASVGDRVTITCRASQDIRTDLAWYQQKPGKAPKRLIYAASSLQSGVPSRFSGSGSGTEFTLTISSLQPEDFATYYCLQHNRYPLTFGGGTKVDIKSGGGGSEVQLVESGGGLVQPGGSLKLSCAASGFTFNKYAMNWVRQAPGKGLEWVARIRSKYNNYATYYADSVKDRFTISRDDSKNTAYLQMNNLKTEDTAVYYCVRHGNFGNSYISYWAYWGQGTLVTVSSGGGGSGGGGSGGGGSQTVVTQEPSLTVSPGGTVTLTCGSSTGAVTSGNYPNWVQQKPGQAPRGLIGGTKFLAPGTPARFSGSLLGGKAALTLSGVQPEDEAEYYCVLWYSNRWVFGGGTKLTVL

SEQ ID NO: 411 - protein, 7 aa, Artificial Sequence
  Synthetic
YARMGVS

SEQ ID NO: 412 - protein, 16 aa, Artificial Sequence
  Synthetic
QIFSNDEKSYSTSLKS

SEQ ID NO: 413 - protein, 14 aa, Artificial Sequence
  Synthetic
IVGYGTGWYGFFDY

SEQ ID NO: 414 - protein, 11 aa, Artificial Sequence
  Synthetic
RASQGIRNDLG

SEQ ID NO: 415 - protein, 7 aa, Artificial Sequence
  Synthetic
AASSLQS

SEQ ID NO: 416 - protein, 9 aa, Artificial Sequence
  Synthetic
LQHNSYPLT

SEQ ID NO: 417 - protein, 124 aa, Artificial Sequence
  Synthetic
QVTLKESGPALVKPTETLTLTCTVSGFSLSYARMGVSWIRQPPGKALEWLAQIFSNDEKSYSTSLKSRLTISKGTSNSQVVLTMTNMDPEDTATYYCARIVGYGTGWYGFFDYWGQGILVTVSS

SEQ ID NO: 418 - protein, 107 aa, Artificial Sequence
  Synthetic
DIQMTQSPSSLSASVGDRVTITCRASQGIRNDLGWYQQKPGKAPKRLIYAASSLQSGVPSRFSGSGSGTEFTLTISSLQPEDFATYYCLQHNSYPLTFGGGTKVDIK

SEQ ID NO: 419 - protein, 246 aa, Artificial Sequence
  Synthetic
QVTLKESGPALVKPTETLTLTCTVSGFSLSYARMGVSWIRQPPGKALEWLAQIFSNDEKSYSTSLKSRLTISKGTSNSQVVLTMTNMDPEDTATYYCARIVGYGTGWYGFFDYWGQGILVTVSSGGGGSGGGGSGGGGSDIQMTQSPSSLSASVGDRVTITCRASQGIRNDLGWYQQKPGKAPKRLIYAASSLQSGVPSRFSGSGSGTEFTLTISSLQPEDFATYYCLQHNSYPLTFGGGTKVDIK

SEQ ID NO: 420 - protein, 501 aa, Artificial Sequence
  Synthetic
QVTLKESGPALVKPTETLTLTCTVSGFSLSYARMGVSWIRQPPGKALEWLAQIFSNDEKSYSTSLKSRLTISKGTSNSQVVLTMTNMDPEDTATYYCARIVGYGTGWYGFFDYWGQGILVTVSSGGGGSGGGGSGGGGSDIQMTQSPSSLSASVGDRVTITCRASQGIRNDLGWYQQKPGKAPKRLIYAASSLQSGVPSRFSGSGSGTEFTLTISSLQPEDFATYYCLQHNSYPLTFGGGTKVDIKSGGGGSEVQLVESGGGLVQPGGSLKLSCAASGFTFNKYAMNWVRQAPGKGLEWVARIRSKYNNYATYYADSVKDRFTISRDDSKNTAYLQMNNLKTEDTAVYYCVRHGNFGNSYISYWAYWGQGTLVTVSSGGGGSGGGGSGGGGSQTVVTQEPSLTVSPGGTVTLTCGSSTGAVTSGNYPNWVQQKPGQAPRGLIGGTKFLAPGTPARFSGSLLGGKAALTLSGVQPEDEAEYYCVLWYSNRWVFGGGTKLTVL

SEQ ID NO: 421 - protein, 7 aa, Artificial Sequence
  Synthetic
NARMGVS

SEQ ID NO: 422 - protein, 16 aa, Artificial Sequence
  Synthetic
HIFSNDEKSYSTSLKS

SEQ ID NO: 423 - protein, 17 aa, Artificial Sequence
  Synthetic
IPGYGGNFYYHYYGMDV

SEQ ID NO: 424 - protein, 11 aa, Artificial Sequence
  Synthetic
RASQGIRNDLA

SEQ ID NO: 425 - protein, 7 aa, Artificial Sequence
  Synthetic
AASTVQS

SEQ ID NO: 426 - protein, 9 aa, Artificial Sequence
  Synthetic
LQHNSFPWT

SEQ ID NO: 427 - protein, 127 aa, Artificial Sequence
  Synthetic
QVTLKESGPTLVKPTETLTLTCTVSGFSLSNARMGVSWIRQPPGKALEWLAHIFSNDEKSYSTSLKSRLTISKDTSKSQVVLTMTNMDPVDTATYYCARIPGYGGNFYYHYYGMDVWGQGTTVTVSS

SEQ ID NO: 428 - protein, 107 aa, Artificial Sequence
  Synthetic
DIQMTQSPSSLSASVGDRVTITCRASQGIRNDLAWYQQKPGKAPKRLIYAASTVQSGVPSRFSGSGSGTEFALTISSLQPEDFATYYCLQHNSFPWTFGQGTKVDIK

SEQ ID NO: 429 - protein, 249 aa, Artificial Sequence
  Synthetic
QVTLKESGPTLVKPTETLTLTCTVSGFSLSNARMGVSWIRQPPGKALEWLAHIFSNDEKSYSTSLKSRLTISKDTSKSQVVLTMTNMDPVDTATYYCARIPGYGGNFYYHYYGMDVWGQGTTVTVSSGGGGSGGGGSGGGGSDIQMTQSPSSLSASVGDRVTITCRASQGIRNDLAWYQQKPGKAPKRLIYAASTVQSGVPSRFSGSGSGTEFALTISSLQPEDFATYYCLQHNSFPWTFGQGTKVDIK

SEQ ID NO: 430 - protein, 504 aa, Artificial Sequence [sequence omitted]

SEQ ID NO: 431 - protein, 7 aa, Artificial Sequence
  Synthetic
NARMGVS

SEQ ID NO: 432 - protein, 16 aa, Artificial Sequence
  Synthetic
HIFSNDEKSYSTSLKS

SEQ ID NO: 433 - protein, 14 aa, Artificial Sequence
  Synthetic
MPEYSSGWSGAFDI

SEQ ID NO: 434 - protein, 11 aa, Artificial Sequence
  Synthetic
RASQDIRDDLG

SEQ ID NO: 435 - protein, 7 aa, Artificial Sequence
  Synthetic
GASTLQS

SEQ ID NO: 436 - protein, 9 aa, Artificial Sequence
  Synthetic
LQHNSYPLT

SEQ ID NO: 437 - protein, 124 aa, Artificial Sequence
  Synthetic
QVTLKESGPVLVKPTETLTLTCTVSGFSFRNARMGVSWIRQPPGKALEWLAHIFSNDEKSYSTSLKSRLTISKDTSKSQVVLTLTNMDPVDTATYFCARMPEYSSGWSGAFDIWGQGTMVTVSS

SEQ ID NO: 438 - protein, 107 aa, Artificial Sequence; identical to SEQ ID NO: 378
  Synthetic

SEQ ID NO: 439 - protein, 246 aa, Artificial Sequence
  Synthetic
QVTLKESGPVLVKPTETLTLTCTVSGFSFRNARMGVSWIRQPPGKALEWLAHIFSNDEKSYSTSLKSRLTISKDTSKSQVVLTLTNMDPVDTATYFCARMPEYSSGWSGAFDIWGQGTMVTVSSGGGGSGGGGSGGGGSDIQMTQSPSSLSASVGDRVTITCRASQDIRDDLGWYQQKPGNAPKRLIYGASTLQSGVPSRFSGSGSGTEFTLTISSLQPEDFATYYCLQHNSYPLTFGGGTKVDIK

SEQ ID NO: 440 - protein, 501 aa, Artificial Sequence
  Synthetic
QVTLKESGPVLVKPTETLTLTCTVSGFSFRNARMGVSWIRQPPGKALEWLAHIFSNDEKSYSTSLKSRLTISKDTSKSQVVLTLTNMDPVDTATYFCARMPEYSSGWSGAFDIWGQGTMVTVSSGGGGSGGGGSGGGGSDIQMTQSPSSLSASVGDRVTITCRASQDIRDDLGWYQQKPGNAPKRLIYGASTLQSGVPSRFSGSGSGTEFTLTISSLQPEDFATYYCLQHNSYPLTFGGGTKVDIKSGGGGSEVQLVESGGGLVQPGGSLKLSCAASGFTFNKYAMNWVRQAPGKGLEWVARIRSKYNNYATYYADSVKDRFTISRDDSKNTAYLQMNNLKTEDTAVYYCVRHGNFGNSYISYWAYWGQGTLVTVSSGGGGSGGGGSGGGGSQTVVTQEPSLTVSPGGTVTLTCGSSTGAVTSGNYPNWVQQKPGQAPRGLIGGTKFLAPGTPARFSGSLLGGKAALTLSGVQPEDEAEYYCVLWYSNRWVFGGGTKLTVL

SEQ ID NO: 441 - protein, 7 aa, Artificial Sequence
  Synthetic
NAKMGVS

SEQ ID NO: 442 - protein, 16 aa, Artificial Sequence
  Synthetic
QIFSNGEKSYSTSLKS

SEQ ID NO: 443 - protein, 14 aa, Artificial Sequence
  Synthetic
IVGYGSGWYGYFDY

SEQ ID NO: 444 - protein, 11 aa, Artificial Sequence
  Synthetic
RASQGIRNDLG

SEQ ID NO: 445 - protein, 7 aa, Artificial Sequence
  Synthetic
GASTLQS

SEQ ID NO: 446 - protein, 9 aa, Artificial Sequence
  Synthetic
LQHNSYPLT

SEQ ID NO: 447 - protein, 124 aa, Artificial Sequence
  Synthetic
QVTLKESGPVLVKPTETLTLTCTLSGFSLNNAKMGVSWIRQPPGKALEWLAQIFSNGEKSYSTSLKSRLTISKDTSKGQVVLTMTNMDPVDTATYYCSRIVGYGSGWYGYFDYWGQGTLVTVSS

SEQ ID NO: 448 - protein, 107 aa, Artificial Sequence
  Synthetic
DIQMTQSPSSLSASVGDRVTITCRASQGIRNDLGWYQQKPGKAPKRLIYGASTLQSGVPSRFSGSGSGTEFTLTISSLQPEDFATYYCLQHNSYPLTFGGGTKVEIK

SEQ ID NO: 449 - protein, 246 aa, Artificial Sequence
  Synthetic
QVTLKESGPVLVKPTETLTLTCTLSGFSLNNAKMGVSWIRQPPGKALEWLAQIFSNGEKSYSTSLKSRLTISKDTSKGQVVLTMTNMDPVDTATYYCSRIVGYGSGWYGYFDYWGQGTLVTVSSGGGGSGGGGSGGGGSDIQMTQSPSSLSASVGDRVTITCRASQGIRNDLGWYQQKPGKAPKRLIYGASTLQSGVPSRFSGSGSGTEFTLTISSLQPEDFATYYCLQHNSYPLTFGGGTKVEIK

SEQ ID NO: 450 - protein, 501 aa, Artificial Sequence
  Synthetic
QVTLKESGPVLVKPTETLTLTCTLSGFSLNNAKMGVSWIRQPPGKALEWLAQIFSNGEKSYSTSLKSRLTISKDTSKGQVVLTMTNMDPVDTATYYCSRIVGYGSGWYGYFDYWGQGTLVTVSSGGGGSGGGGSGGGGSDIQMTQSPSSLSASVGDRVTITCRASQGIRNDLGWYQQKPGKAPKRLIYGASTLQSGVPSRFSGSGSGTEFTLTISSLQPEDFATYYCLQHNSYPLTFGGGTKVEIKSGGGGSEVQLVESGGGLVQPGGSLKLSCAASGFTFNKYAMNWVRQAPGKGLEWVARIRSKYNNYATYYADSVKDRFTISRDDSKNTAYLQMNNLKTEDTAVYYCVRHGNFGNSYISYWAYWGQGTLVTVSSGGGGSGGGGSGGGGSQTVVTQEPSLTVSPGGTVTLTCGSSTGAVTSGNYPNWVQQKPGQAPRGLIGGTKFLAPGTPARFSGSLLGGKAALTLSGVQPEDEAEYYCVLWYSNRWVFGGGTKLTVL

SEQ ID NO: 451 - protein, 7 aa, Artificial Sequence
  Synthetic
NARMGVS

SEQ ID NO: 452 - protein, 16 aa, Artificial Sequence
  Synthetic
NIFSNDEKSYSTSLKS

SEQ ID NO: 453 - protein, 14 aa, Artificial Sequence
  Synthetic
IVGYGSGWYGYFDY

SEQ ID NO: 454 - protein, 11 aa, Artificial Sequence
  Synthetic
RASQGIRNDLG

SEQ ID NO: 455 - protein, 7 aa, Artificial Sequence
  Synthetic
AASSLQS

SEQ ID NO: 456 - protein, 9 aa, Artificial Sequence
  Synthetic
LQHNSYPLT

SEQ ID NO: 457 - protein, 124 aa, Artificial Sequence
  Synthetic
QVTLKESGPALVKPTETLTLTCTVSGFSLSNARMGVSWIRQPPGKALEWLANIFSNDEKSYSTSLKSRLTISKGTSKSQVVLTMTNMDPEDTATYYCARIVGYGSGWYGYFDYWGQGTLVTVSS

SEQ ID NO: 458 - protein, 107 aa, Artificial Sequence
  Synthetic
DIQMTQSPSSLSASVGDRVTITCRASQGIRNDLGWYQQKPGKAPQRLIYAASSLQSGVPSRFSGSGSGTEFTLTISSLQPEDFATYYCLQHNSYPLTFGGGTKVEIK

SEQ ID NO: 459 - protein, 246 aa, Artificial Sequence
  Synthetic
QVTLKESGPALVKPTETLTLTCTVSGFSLSNARMGVSWIRQPPGKALEWLANIFSNDEKSYSTSLKSRLTISKGTSKSQVVLTMTNMDPEDTATYYCARIVGYGSGWYGYFDYWGQGTLVTVSSGGGGSGGGGSGGGGSDIQMTQSPSSLSASVGDRVTITCRASQGIRNDLGWYQQKPGKAPQRLIYAASSLQSGVPSRFSGSGSGTEFTLTISSLQPEDFATYYCLQHNSYPLTFGGGTKVEIK

SEQ ID NO: 460 - protein, 501 aa, Artificial Sequence
  Synthetic
QVTLKESGPALVKPTETLTLTCTVSGFSLSNARMGVSWIRQPPGKALEWLANIFSNDEKSYSTSLKSRLTISKGTSKSQVVLTMTNMDPEDTATYYCARIVGYGSGWYGYFDYWGQGTLVTVSSGGGGSGGGGSGGGGSDIQMTQSPSSLSASVGDRVTITCRASQGIRNDLGWYQQKPGKAPQRLIYAASSLQSGVPSRFSGSGSGTEFTLTISSLQPEDFATYYCLQHNSYPLTFGGGTKVEIKSGGGGSEVQLVESGGGLVQPGGSLKLSCAASGFTFNKYAMNWVRQAPGKGLEWVARIRSKYNNYATYYADSVKDRFTISRDDSKNTAYLQMNNLKTEDTAVYYCVRHGNFGNSYISYWAYWGQGTLVTVSSGGGGSGGGGSGGGGSQTVVTQEPSLTVSPGGTVTLTCGSSTGAVTSGNYPNWVQQKPGQAPRGLIGGTKFLAPGTPARFSGSLLGGKAALTLSGVQPEDEAEYYCVLWYSNRWVFGGGTKLTVL

SEQ ID NO: 461 - protein, 7 aa, Artificial Sequence
  Synthetic
NARMGVS

SEQ ID NO: 462 - protein, 16 aa, Artificial Sequence
  Synthetic
HIFSNDEKSYSTSLKN

SEQ ID NO: 463 - protein, 14 aa, Artificial Sequence
  Synthetic
IVGYGSGWYGFFDY

SEQ ID NO: 464 - protein, 11 aa, Artificial Sequence
  Synthetic
RASQGIRNDLG

SEQ ID NO: 465 - protein, 7 aa, Artificial Sequence
  Synthetic
AASTLQS

SEQ ID NO: 466 - protein, 9 aa, Artificial Sequence
  Synthetic
LQHNSYPLT

SEQ ID NO: 467 - protein, 124 aa, Artificial Sequence
  Synthetic
QVTLKESGPTLVKPTETLTLTCTLSGFSLNNARMGVSWIRQPPGKALEWLAHIFSNDEKSYSTSLKNRLTISKDSSKTQVVLTMTNVDPVDTATYYCARIVGYGSGWYGFFDYWGQGTLVTVSS

SEQ ID NO: 468 - protein, 107 aa, Artificial Sequence
  Synthetic
DIQMTQSPSSLSASVGDRVTITCRASQGIRNDLGWYQQKPGKAPKRLIYAASTLQSGVPSRFSGSGSGTEFTLTISSLQPEDFATYYCLQHNSYPLTFGGGTKVEIK

SEQ ID NO: 469 - protein, 246 aa, Artificial Sequence
  Synthetic
QVTLKESGPTLVKPTETLTLTCTLSGFSLNNARMGVSWIRQPPGKALEWLAHIFSNDEKSYSTSLKNRLTISKDSSKTQVVLTMTNVDPVDTATYYCARIVGYGSGWYGFFDYWGQGTLVTVSSGGGGSGGGGSGGGGSDIQMTQSPSSLSASVGDRVTITCRASQGIRNDLGWYQQKPGKAPKRLIYAASTLQSGVPSRFSGSGSGTEFTLTISSLQPEDFATYYCLQHNSYPLTFGGGTKVEIK

SEQ ID NO: 470 - protein, 501 aa, Artificial Sequence
  Synthetic
QVTLKESGPTLVKPTETLTLTCTLSGFSLNNARMGVSWIRQPPGKALEWLAHIFSNDEKSYSTSLKNRLTISKDSSKTQVVLTMTNVDPVDTATYYCARIVGYGSGWYGFFDYWGQGTLVTVSSGGGGSGGGGSGGGGSDIQMTQSPSSLSASVGDRVTITCRASQGIRNDLGWYQQKPGKAPKRLIYAASTLQSGVPSRFSGSGSGTEFTLTISSLQPEDFATYYCLQHNSYPLTFGGGTKVEIKSGGGGSEVQLVESGGGLVQPGGSLKLSCAASGFTFNKYAMNWVRQAPGKGLEWVARIRSKYNNYATYYADSVKDRFTISRDDSKNTAYLQMNNLKTEDTAVYYCVRHGNFGNSYISYWAYWGQGTLVTVSSGGGGSGGGGSGGGGSQTVVTQEPSLTVSPGGTVTLTCGSSTGAVTSGNYPNWVQQKPGQAPRGLIGGTKFLAPGTPARFSGSLLGGKAALTLSGVQPEDEAEYYCVLWYSNRWVFGGGTKLTVL

SEQ ID NO: 471 - protein, 7 aa, Artificial Sequence
  Synthetic
NARMAVS

SEQ ID NO: 472 - protein, 16 aa, Artificial Sequence
  Synthetic
HIFSNDEKSYSTSLKS

SEQ ID NO: 473 - protein, 14 aa, Artificial Sequence
  Synthetic
IVGYGSGWYGYFDY

SEQ ID NO: 474 - protein, 11 aa, Artificial Sequence
  Synthetic
RASQDIRNDLG

SEQ ID NO: 475 - protein, 7 aa, Artificial Sequence
  Synthetic
AASTLQS

SEQ ID NO: 476 - protein, 9 aa, Artificial Sequence
  Synthetic
LQHNSYPLT

SEQ ID NO: 477 - protein, 124 aa, Artificial Sequence
  Synthetic
QVTLKESGPALVKPTETLTLTCTLSGFSLNNARMAVSWIRQPPGKTLEWLAHIFSNDEKSYSTSLKSRLTISKDTSKGQVVLTMTNMDPVDTATYYCARIVGYGSGWYGYFDYWGQGTLVTVSS

SEQ ID NO: 478 - protein, 107 aa, Artificial Sequence
  Synthetic
DIQMTQSPSSLSASVGDRVTITCRASQDIRNDLGWYQQKPGKAPKRLIYAASTLQSGVPSRFSGSGSGTEFTLTISSLQPEDFATYYCLQHNSYPLTFGGGTKVEIK

SEQ ID NO: 479 - protein, 246 aa, Artificial Sequence
  Synthetic
QVTLKESGPALVKPTETLTLTCTLSGFSLNNARMAVSWIRQPPGKTLEWLAHIFSNDEKSYSTSLKSRLTISKDTSKGQVVLTMTNMDPVDTATYYCARIVGYGSGWYGYFDYWGQGTLVTVSSGGGGSGGGGSGGGGSDIQMTQSPSSLSASVGDRVTITCRASQDIRNDLGWYQQKPGKAPKRLIYAASTLQSGVPSRFSGSGSGTEFTLTISSLQPEDFATYYCLQHNSYPLTFGGGTKVEIK

SEQ ID NO: 480 - protein, 501 aa, Artificial Sequence
  Synthetic
QVTLKESGPALVKPTETLTLTCTLSGFSLNNARMAVSWIRQPPGKTLEWLAHIFSNDEKSYSTSLKSRLTISKDTSKGQVVLTMTNMDPVDTATYYCARIVGYGSGWYGYFDYWGQGTLVTVSSGGGGSGGGGSGGGGSDIQMTQSPSSLSASVGDRVTITCRASQDIRNDLGWYQQKPGKAPKRLIYAASTLQSGVPSRFSGSGSGTEFTLTISSLQPEDFATYYCLQHNSYPLTFGGGTKVEIKSGGGGSEVQLVESGGGLVQPGGSLKLSCAASGFTFNKYAMNWVRQAPGKGLEWVARIRSKYNNYATYYADSVKDRFTISRDDSKNTAYLQMNNLKTEDTAVYYCVRHGNFGNSYISYWAYWGQGTLVTVSSGGGGSGGGGSGGGGSQTVVTQEPSLTVSPGGTVTLTCGSSTGAVTSGNYPNWVQQKPGQAPRGLIGGTKFLAPGTPARFSGSLLGGKAALTLSGVQPEDEAEYYCVLWYSNRWVFGGGTKLTVL

SEQ ID NO: 481 - protein, 7 aa, Artificial Sequence
  Synthetic
NARMAVS

SEQ ID NO: 482 - protein, 16 aa, Artificial Sequence
  Synthetic
HIFSNDEKSYSTSLKS

SEQ ID NO: 483 - protein, 14 aa, Artificial Sequence
  Synthetic
IVGYGSGWYGYFDY

SEQ ID NO: 484 - protein, 11 aa, Artificial Sequence
  Synthetic
RASQDIGNDLG

SEQ ID NO: 485 - protein, 7 aa, Artificial Sequence
  Synthetic
AASSLQS

SEQ ID NO: 486 - protein, 9 aa, Artificial Sequence
  Synthetic
LQHNSYPLT

SEQ ID NO: 487 - protein, 124 aa, Artificial Sequence; identical to SEQ ID NO: 477
  Synthetic

SEQ ID NO: 488 - protein, 107 aa, Artificial Sequence
  Synthetic
DIQMTQSPSSLSASVGDRVTITCRASQDIGNDLGWYQQKPGKAPKRLIYAASSLQSGVPSRFSGSGSGTEFTLTISSLQPEDFATYYCLQHNSYPLTFGGGTKVEIK

SEQ ID NO: 489 - protein, 246 aa, Artificial Sequence
  Synthetic
QVTLKESGPALVKPTETLTLTCTLSGFSLNNARMAVSWIRQPPGKTLEWLAHIFSNDEKSYSTSLKSRLTISKDTSKGQVVLTMTNMDPVDTATYYCARIVGYGSGWYGYFDYWGQGTLVTVSSGGGGSGGGGSGGGGSDIQMTQSPSSLSASVGDRVTITCRASQDIGNDLGWYQQKPGKAPKRLIYAASSLQSGVPSRFSGSGSGTEFTLTISSLQPEDFATYYCLQHNSYPLTFGGGTKVEIK

SEQ ID NO: 490 - protein, 501 aa, Artificial Sequence
  Synthetic
QVTLKESGPALVKPTETLTLTCTLSGFSLNNARMAVSWIRQPPGKTLEWLAHIFSNDEKSYSTSLKSRLTISKDTSKGQVVLTMTNMDPVDTATYYCARIVGYGSGWYGYFDYWGQGTLVTVSSGGGGSGGGGSGGGGSDIQMTQSPSSLSASVGDRVTITCRASQDIGNDLGWYQQKPGKAPKRLIYAASSLQSGVPSRFSGSGSGTEFTLTISSLQPEDFATYYCLQHNSYPLTFGGGTKVEIKSGGGGSEVQLVESGGGLVQPGGSLKLSCAASGFTFNKYAMNWVRQAPGKGLEWVARIRSKYNNYATYYADSVKDRFTISRDDSKNTAYLQMNNLKTEDTAVYYCVRHGNFGNSYISYWAYWGQGTLVTVSSGGGGSGGGGSGGGGSQTVVTQEPSLTVSPGGTVTLTCGSSTGAVTSGNYPNWVQQKPGQAPRGLIGGTKFLAPGTPARFSGSLLGGKAALTLSGVQPEDEAEYYCVLWYSNRWVFGGGTKLTVL

SEQ ID NO: 491 - protein, 7 aa, Artificial Sequence
  Synthetic
NARMAVS

SEQ ID NO: 492 - protein, 16 aa, Artificial Sequence
  Synthetic
HIFSNDEKSYSTSLKS

SEQ ID NO: 493 - protein, 14 aa, Artificial Sequence
  Synthetic
IVGYGSGWYGYFDY

SEQ ID NO: 494 - protein, 11 aa, Artificial Sequence
  Synthetic
RASQDIRYDLA

SEQ ID NO: 495 - protein, 7 aa, Artificial Sequence
  Synthetic
AASSLQS

SEQ ID NO: 496 - protein, 9 aa, Artificial Sequence
  Synthetic
LQHNFYPLT

SEQ ID NO: 497 - protein, 124 aa, Artificial Sequence
  Synthetic
QVTLKESGPVLVKPTETLTLTCTVSGFSLRNARMAVSWIRQPPGKTLEWLAHIFSNDEKSYSTSLKSRLTISKDTSKSQVVLTMTNMDPVDTATYYCARIVGYGSGWYGYFDYWGQGTLVTVSS

SEQ ID NO: 498 - protein, 107 aa, Artificial Sequence
  Synthetic
DIQMTQSPSSVSASVGDRVTITCRASQDIRYDLAWYQQKPGKAPKRLIYAASSLQSGVPSRFSGSGSGTEFTLTISSLQPEDFATYYCLQHNFYPLTFGGGTKVEIK

SEQ ID NO: 499 - protein, 246 aa, Artificial Sequence
  Synthetic
QVTLKESGPVLVKPTETLTLTCTVSGFSLRNARMAVSWIRQPPGKTLEWLAHIFSNDEKSYSTSLKSRLTISKDTSKSQVVLTMTNMDPVDTATYYCARIVGYGSGWYGYFDYWGQGTLVTVSSGGGGSGGGGSGGGGSDIQMTQSPSSVSASVGDRVTITCRASQDIRYDLAWYQQKPGKAPKRLIYAASSLQSGVPSRFSGSGSGTEFTLTISSLQPEDFATYYCLQHNFYPLTFGGGTKVEIK

SEQ ID NO: 500 - protein, 501 aa, Artificial Sequence
  Synthetic
QVTLKESGPVLVKPTETLTLTCTVSGFSLRNARMAVSWIRQPPGKTLEWLAHIFSNDEKSYSTSLKSRLTISKDTSKSQVVLTMTNMDPVDTATYYCARIVGYGSGWYGYFDYWGQGTLVTVSSGGGGSGGGGSGGGGSDIQMTQSPSSVSASVGDRVTITCRASQDIRYDLAWYQQKPGKAPKRLIYAASSLQSGVPSRFSGSGSGTEFTLTISSLQPEDFATYYCLQHNFYPLTFGGGTKVEIKSGGGGSEVQLVESGGGLVQPGGSLKLSCAASGFTFNKYAMNWVRQAPGKGLEWVARIRSKYNNYATYYADSVKDRFTISRDDSKNTAYLQMNNLKTEDTAVYYCVRHGNFGNSYISYWAYWGQGTLVTVSSGGGGSGGGGSGGGGSQTVVTQEPSLTVSPGGTVTLTCGSSTGAVTSGNYPNWVQQKPGQAPRGLIGGTKFLAPGTPARFSGSLLGGKAALTLSGVQPEDEAEYYCVLWYSNRWVFGGGTKLTVL

SEQ ID NO: 501 - protein, 7 aa, Artificial Sequence
  Synthetic
NARMGVS

SEQ ID NO: 502 - protein, 16 aa, Artificial Sequence
  Synthetic
NIFSNDEKSYSTSLKS

SEQ ID NO: 503 - protein, 14 aa, Artificial Sequence
  Synthetic
IVGYGSGWYGYFDY

SEQ ID NO: 504 - protein, 11 aa, Artificial Sequence
  Synthetic
RASQDIRNDLG

SEQ ID NO: 505 - protein, 7 aa, Artificial Sequence
  Synthetic
ATSIRQS

SEQ ID NO: 506 - protein, 9 aa, Artificial Sequence
  Synthetic
LQHNSFPLT

SEQ ID NO: 507 - protein, 124 aa, Artificial Sequence
  Synthetic
QVTLKESGPTLVKPTETLTLTCTVSGFSLSNARMGVSWIRQPPGKALEWLANIFSNDEKSYSTSLKSRLTISKGTSKSQVVLTMTNVNPVDTGTYYCARIVGYGSGWYGYFDYWGQGTLVTVSS

SEQ ID NO: 508 - protein, 107 aa, Artificial Sequence
  Synthetic
DIQMTQSPSSLSASVGDRVTITCRASQDIRNDLGWYQQKPGKAPKRLIYATSIRQSGVPSRFTGSGSGTEFTLTISGLQPEDFATYFCLQHNSFPLTFGGGTKVEIK

SEQ ID NO: 509 - protein, 246 aa, Artificial Sequence
  Synthetic
QVTLKESGPTLVKPTETLTLTCTVSGFSLSNARMGVSWIRQPPGKALEWLANIFSNDEKSYSTSLKSRLTISKGTSKSQVVLTMTNVNPVDTGTYYCARIVGYGSGWYGYFDYWGQGTLVTVSSGGGGSGGGGSGGGGSDIQMTQSPSSLSASVGDRVTITCRASQDIRNDLGWYQQKPGKAPKRLIYATSIRQSGVPSRFTGSGSGTEFTLTISGLQPEDFATYFCLQHNSFPLTFGGGTKVEIK

SEQ ID NO: 510 - protein, 501 aa, Artificial Sequence
  Synthetic
QVTLKESGPTLVKPTETLTLTCTVSGFSLSNARMGVSWIRQPPGKALEWLANIFSNDEKSYSTSLKSRLTISKGTSKSQVVLTMTNVNPVDTGTYYCARIVGYGSGWYGYFDYWGQGTLVTVSSGGGGSGGGGSGGGGSDIQMTQSPSSLSASVGDRVTITCRASQDIRNDLGWYQQKPGKAPKRLIYATSIRQSGVPSRFTGSGSGTEFTLTISGLQPEDFATYFCLQHNSFPLTFGGGTKVEIKSGGGGSEVQLVESGGGLVQPGGSLKLSCAASGFTFNKYAMNWVRQAPGKGLEWVARIRSKYNNYATYYADSVKDRFTISRDDSKNTAYLQMNNLKTEDTAVYYCVRHGNFGNSYISYWAYWGQGTLVTVSSGGGGSGGGGSGGGGSQTVVTQEPSLTVSPGGTVTLTCGSSTGAVTSGNYPNWVQQKPGQAPRGLIGGTKFLAPGTPARFSGSLLGGKAALTLSGVQPEDEAEYYCVLWYSNRWVFGGGTKLTVL

SEQ ID NO: 511 - protein, 7 aa, Artificial Sequence
  Synthetic
NARMGVS

SEQ ID NO: 512 - protein, 16 aa, Artificial Sequence
  Synthetic
HIFSNDEKSFSTSLKN

SEQ ID NO: 513 - protein, 14 aa, Artificial Sequence
  Synthetic
MVGYGSGWYAYFDY

SEQ ID NO: 514 - protein, 11 aa, Artificial Sequence
  Synthetic
RASQSISSYLN

SEQ ID NO: 515 - protein, 7 aa, Artificial Sequence
  Synthetic
AASSLQS

SEQ ID NO: 516 - protein, 9 aa, Artificial Sequence
  Synthetic
LQHNSYPLT

SEQ ID NO: 517 - protein, 124 aa, Artificial Sequence
  Synthetic
QVTLKESGPVLVKPTQTLTLTCTFSGFSLSNARMGVSWIRQPPGKALEWLAHIFSNDEKSFSTSLKNRLTISKDTSKSQVVLTMTNMDPVDTATYYCARMVGYGSGWYAYFDYWGQGTQVTVSS

SEQ ID NO: 518 - protein, 107 aa, Artificial Sequence
  Synthetic
DIQMTQSPSSLSASVGDRVTITCRASQSISSYLNWYQQKPGKAPKLLIYAASSLQSGVPSRFSGSGSGTDFTLTISSLQPEDFATYYCLQHNSYPLTFGGGTKVEIK

SEQ ID NO: 519 - protein, 246 aa, Artificial Sequence
  Synthetic
QVTLKESGPVLVKPTQTLTLTCTFSGFSLSNARMGVSWIRQPPGKALEWLAHIFSNDEKSFSTSLKNRLTISKDTSKSQVVLTMTNMDPVDTATYYCARMVGYGSGWYAYFDYWGQGTQVTVSSGGGGSGGGGSGGGGSDIQMTQSPSSLSASVGDRVTITCRASQSISSYLNWYQQKPGKAPKLLIYAASSLQSGVPSRFSGSGSGTDFTLTISSLQPEDFATYYCLQHNSYPLTFGGGTKVEIK

SEQ ID NO: 520 - protein, 501 aa, Artificial Sequence
  Synthetic
QVTLKESGPVLVKPTQTLTLTCTFSGFSLSNARMGVSWIRQPPGKALEWLAHIFSNDEKSFSTSLKNRLTISKDTSKSQVVLTMTNMDPVDTATYYCARMVGYGSGWYAYFDYWGQGTQVTVSSGGGGSGGGGSGGGGSDIQMTQSPSSLSASVGDRVTITCRASQSISSYLNWYQQKPGKAPKLLIYAASSLQSGVPSRFSGSGSGTDFTLTISSLQPEDFATYYCLQHNSYPLTFGGGTKVEIKSGGGGSEVQLVESGGGLVQPGGSLKLSCAASGFTFNKYAMNWVRQAPGKGLEWVARIRSKYNNYATYYADSVKDRFTISRDDSKNTAYLQMNNLKTEDTAVYYCVRHGNFGNSYISYWAYWGQGTLVTVSSGGGGSGGGGSGGGGSQTVVTQEPSLTVSPGGTVTLTCGSSTGAVTSGNYPNWVQQKPGQAPRGLIGGTKFLAPGTPARFSGSLLGGKAALTLSGVQPEDEAEYYCVLWYSNRWVFGGGTKLTVL

SEQ ID NO: 521 - protein, 7 aa, Artificial Sequence
  Synthetic
YARMGVS

SEQ ID NO: 522 - protein, 16 aa, Artificial Sequence
  Synthetic
QIFSNDEKSYSTSLKS

SEQ ID NO: 523 - protein, 14 aa, Artificial Sequence
  Synthetic
IVGYGTGWYGYFDY

SEQ ID NO: 524 - protein, 11 aa, Artificial Sequence
  Synthetic
RASQDIGDDLG

SEQ ID NO: 525 - protein, 7 aa, Artificial Sequence
  Synthetic
AASTLQS

SEQ ID NO: 526 - protein, 9 aa, Artificial Sequence
  Synthetic
LQHNSYPLT

SEQ ID NO: 527 - protein, 124 aa, Artificial Sequence
  Synthetic
QVTLKESGPTLVKPTETLTLTCTVSGFSLSYARMGVSWIRQPPGKALEWLAQIFSNDEKSYSTSLKSRLTISKDTSKSQVVLTMTDMDPEDTATYYCARIVGYGTGWYGYFDYWGQGTQVTVSS

SEQ ID NO: 528 - protein, 107 aa, Artificial Sequence
  Synthetic
DIQMTQSPSSLSASVGDRVTITCRASQDIGDDLGWYQQKPGKAPKRLIYAASTLQSGVPFRFSGSGSGTDFTLTISSLQPEDFATYYCLQHNSYPLTFGGGTKVEIK

SEQ ID NO: 529 - protein, 246 aa, Artificial Sequence
  Synthetic
QVTLKESGPTLVKPTETLTLTCTVSGFSLSYARMGVSWIRQPPGKALEWLAQIFSNDEKSYSTSLKSRLTISKDTSKSQVVLTMTDMDPEDTATYYCARIVGYGTGWYGYFDYWGQGTQVTVSSGGGGSGGGGSGGGGSDIQMTQSPSSLSASVGDRVTITCRASQDIGDDLGWYQQKPGKAPKRLIYAASTLQSGVPFRFSGSGSGTDFTLTISSLQPEDFATYYCLQHNSYPLTFGGGTKVEIK

SEQ ID NO: 530 - protein, 501 aa, Artificial Sequence
  Synthetic
QVTLKESGPTLVKPTETLTLTCTVSGFSLSYARMGVSWIRQPPGKALEWLAQIFSNDEKSYSTSLKSRLTISKDTSKSQVVLTMTDMDPEDTATYYCARIVGYGTGWYGYFDYWGQGTQVTVSSGGGGSGGGGSGGGGSDIQMTQSPSSLSASVGDRVTITCRASQDIGDDLGWYQQKPGKAPKRLIYAASTLQSGVPFRFSGSGSGTDFTLTISSLQPEDFATYYCLQHNSYPLTFGGGTKVEIKSGGGGSEVQLVESGGGLVQPGGSLKLSCAASGFTFNKYAMNWVRQAPGKGLEWVARIRSKYNNYATYYADSVKDRFTISRDDSKNTAYLQMNNLKTEDTAVYYCVRHGNFGNSYISYWAYWGQGTLVTVSSGGGGSGGGGSGGGGSQTVVTQEPSLTVSPGGTVTLTCGSSTGAVTSGNYPNWVQQKPGQAPRGLIGGTKFLAPGTPARFSGSLLGGKAALTLSGVQPEDEAEYYCVLWYSNRWVFGGGTKLTVL

SEQ ID NO: 531 - protein, 7 aa, Artificial Sequence
  Synthetic
NARMAVS

SEQ ID NO: 532 - protein, 16 aa, Artificial Sequence
  Synthetic
HIFSNDEKSYSTSLKS

SEQ ID NO: 533 - protein, 14 aa, Artificial Sequence
  Synthetic
IVGYGTGWYGFFDY

SEQ ID NO: 534 - protein, 11 aa, Artificial Sequence
  Synthetic
RASQGIRNDLA

SEQ ID NO: 535 - protein, 7 aa, Artificial Sequence
  Synthetic
AASSLQS

SEQ ID NO: 536 - protein, 9 aa, Artificial Sequence
  Synthetic
LQHNSYPLT

SEQ ID NO: 537 - protein, 124 aa, Artificial Sequence
  Synthetic
QVTLKESGPALVKPTETLTLTCTLSGFSLNNARMAVSWIRQPPGKTLEWLAHIFSNDEKSYSTSLKSRLTISKDTSKSQVVLTMTNMDPEDTATYYCARIVGYGTGWYGFFDYWGQGILVTVSS

SEQ ID NO: 538 - protein, 107 aa, Artificial Sequence
  Synthetic
DIQMTQSPSSLSASVGDRVTITCRASQGIRNDLAWYQQKPGKAPKRLIYAASSLQSGVPSRFSGSGSGTEFTLTISSLQPEDFATYYCLQHNSYPLTFGGGTKVEIK

SEQ ID NO: 539 - protein, 246 aa, Artificial Sequence
  Synthetic
QVTLKESGPALVKPTETLTLTCTLSGFSLNNARMAVSWIRQPPGKTLEWLAHIFSNDEKSYSTSLKSRLTISKDTSKSQVVLTMTNMDPEDTATYYCARIVGYGTGWYGFFDYWGQGILVTVSSGGGGSGGGGSGGGGSDIQMTQSPSSLSASVGDRVTITCRASQGIRNDLAWYQQKPGKAPKRLIYAASSLQSGVPSRFSGSGSGTEFTLTISSLQPEDFATYYCLQHNSYPLTFGGGTKVEIK

SEQ ID NO: 540 - protein, 501 aa, Artificial Sequence
  Synthetic
QVTLKESGPALVKPTETLTLTCTLSGFSLNNARMAVSWIRQPPGKTLEWLAHIFSNDEKSYSTSLKSRLTISKDTSKSQVVLTMTNMDPEDTATYYCARIVGYGTGWYGFFDYWGQGILVTVSSGGGGSGGGGSGGGGSDIQMTQSPSSLSASVGDRVTITCRASQGIRNDLAWYQQKPGKAPKRLIYAASSLQSGVPSRFSGSGSGTEFTLTISSLQPEDFATYYCLQHNSYPLTFGGGTKVEIKSGGGGSEVQLVESGGGLVQPGGSLKLSCAASGFTFNKYAMNWVRQAPGKGLEWVARIRSKYNNYATYYADSVKDRFTISRDDSKNTAYLQMNNLKTEDTAVYYCVRHGNFGNSYISYWAYWGQGTLVTVSSGGGGSGGGGSGGGGSQTVVTQEPSLTVSPGGTVTLTCGSSTGAVTSGNYPNWVQQKPGQAPRGLIGGTKFLAPGTPARFSGSLLGGKAALTLSGVQPEDEAEYYCVLWYSNRWVFGGGTKLTVL

SEQ ID NO: 541 - protein, 7 aa, Artificial Sequence
  Synthetic
NARMGVS

SEQ ID NO: 542 - protein, 16 aa, Artificial Sequence
  Synthetic
HIFSNDEKSYSTSLKS

SEQ ID NO: 543 - protein, 17 aa, Artificial Sequence
  Synthetic
IPGYGGNFYYHYYGMDV

SEQ ID NO: 544 - protein, 11 aa, Artificial Sequence
  Synthetic
RTSRGIRNDLG

SEQ ID NO: 545 - protein, 7 aa, Artificial Sequence
  Synthetic
AASTLQS

SEQ ID NO: 546 - protein, 9 aa, Artificial Sequence
  Synthetic
LQHNNFPWT

SEQ ID NO: 547 - protein, 127 aa, Artificial Sequence
  Synthetic
QVTLKESGPALVKPTETLTLTCTFSGFSLSNARMGVSWIRQPPGKALEWLAHIFSNDEKSYSTSLKSRLTISKDTSKSQVVLTMTNMDPVDTATYYCARIPGYGGNFYYHYYGMDVWGQGTTVTVSS

SEQ ID NO: 548 - protein, 107 aa, Artificial Sequence
  Synthetic
DIQMTQSPSSLSASVGDRVTITCRTSRGIRNDLGWYQQIPGRAPKRLIYAASTLQSGVPSRFSGSGSGTEFTLTISSLQPEDFATYYCLQHNNFPWTFGQGTKVEIK

SEQ ID NO: 549 - protein, 249 aa, Artificial Sequence
  Synthetic
QVTLKESGPALVKPTETLTLTCTFSGFSLSNARMGVSWIRQPPGKALEWLAHIFSNDEKSYSTSLKSRLTISKDTSKSQVVLTMTNMDPVDTATYYCARIPGYGGNFYYHYYGMDVWGQGTTVTVSSGGGGSGGGGSGGGGSDIQMTQSPSSLSASVGDRVTITCRTSRGIRNDLGWYQQIPGRAPKRLIYAASTLQSGVPSRFSGSGSGTEFTLTISSLQPEDFATYYCLQHNNFPWTFGQGTKVEIK

SEQ ID NO: 550 - protein, 504 aa, Artificial Sequence
  Synthetic
QVTLKESGPALVKPTETLTLTCTFSGFSLSNARMGVSWIRQPPGKALEWLAHIFSNDEKSYSTSLKSRLTISKDTSKSQVVLTMTNMDPVDTATYYCARIPGYGGNFYYHYYGMDVWGQGTTVTVSSGGGGSGGGGSGGGGSDIQMTQSPSSLSASVGDRVTITCRTSRGIRNDLGWYQQIPGRAPKRLIYAASTLQSGVPSRFSGSGSGTEFTLTISSLQPEDFATYYCLQHNNFPWTFGQGTKVEIKSGGGGSEVQLVESGGGLVQPGGSLKLSCAASGFTFNKYAMNWVRQAPGKGLEWVARIRSKYNNYATYYADSVKDRFTISRDDSKNTAYLQMNNLKTEDTAVYYCVRHGNFGNSYISYWAYWGQGTLVTVSSGGGGSGGGGSGGGGSQTVVTQEPSLTVSPGGTVTLTCGSSTGAVTSGNYPNWVQQKPGQAPRGLIGGTKFLAPGTPARFSGSLLGGKAALTLSGVQPEDEAEYYCVLWYSNRWVFGGGTKLTVL

SEQ ID NO: 551 - protein, 7 aa, Artificial Sequence
  Synthetic
NARMGVS

SEQ ID NO: 552 - protein, 16 aa, Artificial Sequence
  Synthetic
HIFSNDEKSYSTSLKS

SEQ ID NO: 553 - protein, 14 aa, Artificial Sequence
  Synthetic
MPEYSSGWSGAFDI

SEQ ID NO: 554 - protein, 11 aa, Artificial Sequence
  Synthetic
RASQGISNYLA

SEQ ID NO: 555 - protein, 7 aa, Artificial Sequence
  Synthetic
AASTLQS

SEQ ID NO: 556 - protein, 9 aa, Artificial Sequence
  Synthetic
LQHNTYPWT

SEQ ID NO: 557 - protein, 124 aa, Artificial Sequence; identical to SEQ ID NO: 437
  Synthetic

SEQ ID NO: 558 - protein, 107 aa, Artificial Sequence
  Synthetic
DIQMTQSPSSLSASVGDRVTITCRASQGISNYLAWYQQKPGKAPKRLIYAASTLQSGVPSRFSGSGSGTEFTLTISSLQPEDFATYYCLQHNTYPWTFGQGTKVEIK

SEQ ID NO: 559 - protein, 246 aa, Artificial Sequence
  Synthetic
QVTLKESGPVLVKPTETLTLTCTVSGFSFRNARMGVSWIRQPPGKALEWLAHIFSNDEKSYSTSLKSRLTISKDTSKSQVVLTLTNMDPVDTATYFCARMPEYSSGWSGAFDIWGQGTMVTVSSGGGGSGGGGSGGGGSDIQMTQSPSSLSASVGDRVTITCRASQGISNYLAWYQQKPGKAPKRLIYAASTLQSGVPSRFSGSGSGTEFTLTISSLQPEDFATYYCLQHNTYPWTFGQGTKVEIK

SEQ ID NO: 560 - protein, 501 aa, Artificial Sequence
  Synthetic
QVTLKESGPVLVKPTETLTLTCTVSGFSFRNARMGVSWIRQPPGKALEWLAHIFSNDEKSYSTSLKSRLTISKDTSKSQVVLTLTNMDPVDTATYFCARMPEYSSGWSGAFDIWGQGTMVTVSSGGGGSGGGGSGGGGSDIQMTQSPSSLSASVGDRVTITCRASQGISNYLAWYQQKPGKAPKRLIYAASTLQSGVPSRFSGSGSGTEFTLTISSLQPEDFATYYCLQHNTYPWTFGQGTKVEIKSGGGGSEVQLVESGGGLVQPGGSLKLSCAASGFTFNKYAMNWVRQAPGKGLEWVARIRSKYNNYATYYADSVKDRFTISRDDSKNTAYLQMNNLKTEDTAVYYCVRHGNFGNSYISYWAYWGQGTLVTVSSGGGGSGGGGSGGGGSQTVVTQEPSLTVSPGGTVTLTCGSSTGAVTSGNYPNWVQQKPGQAPRGLIGGTKFLAPGTPARFSGSLLGGKAALTLSGVQPEDEAEYYCVLWYSNRWVFGGGTKLTVL

SEQ ID NO: 561 - protein, 7 aa, Artificial Sequence
  Synthetic
NARMGVS

SEQ ID NO: 562 - protein, 16 aa, Artificial Sequence
  Synthetic
HIFSNDEKSYSTSLKS

SEQ ID NO: 563 - protein, 14 aa, Artificial Sequence
  Synthetic
MPEYSSGWSGAFDI

SEQ ID NO: 564 - protein, 11 aa, Artificial Sequence
  Synthetic
RASQDIGYDLG

SEQ ID NO: 565 - protein, 7 aa, Artificial Sequence
  Synthetic
AASTLQS

SEQ ID NO: 566 - protein, 9 aa, Artificial Sequence
  Synthetic
LQHNSFPWT

SEQ ID NO: 567 - protein, 124 aa, Artificial Sequence
  Synthetic
QVTLKESGPALVKPTETLTLTCTVSGFSFRNARMGVSWIRQPPGKALEWLAHIFSNDEKSYSTSLKSRLTISKDTSKSQVVLTLTNMDPVDTATYFCARMPEYSSGWSGAFDIWGQGTMVTVSS

SEQ ID NO: 568 - protein, 107 aa, Artificial Sequence
  Synthetic
DIQMTQSPSSLSASVGDRVTITCRASQDIGYDLGWYQQKPGKAPKRLIYAASTLQSGVPSRFSGSGSGTEFTLIISSLQPEDFATYYCLQHNSFPWTFGQGTKVEIK

SEQ ID NO: 569 - protein, 246 aa, Artificial Sequence
  Synthetic
QVTLKESGPALVKPTETLTLTCTVSGFSFRNARMGVSWIRQPPGKALEWLAHIFSNDEKSYSTSLKSRLTISKDTSKSQVVLTLTNMDPVDTATYFCARMPEYSSGWSGAFDIWGQGTMVTVSSGGGGSGGGGSGGGGSDIQMTQSPSSLSASVGDRVTITCRASQDIGYDLGWYQQKPGKAPKRLIYAASTLQSGVPSRFSGSGSGTEFTLIISSLQPEDFATYYCLQHNSFPWTFGQGTKVEIK

SEQ ID NO: 570 - protein, 501 aa, Artificial Sequence
  Synthetic
QVTLKESGPALVKPTETLTLTCTVSGFSFRNARMGVSWIRQPPGKALEWLAHIFSNDEKSYSTSLKSRLTISKDTSKSQVVLTLTNMDPVDTATYFCARMPEYSSGWSGAFDIWGQGTMVTVSSGGGGSGGGGSGGGGSDIQMTQSPSSLSASVGDRVTITCRASQDIGYDLGWYQQKPGKAPKRLIYAASTLQSGVPSRFSGSGSGTEFTLIISSLQPEDFATYYCLQHNSFPWTFGQGTKVEIKSGGGGSEVQLVESGGGLVQPGGSLKLSCAASGFTFNKYAMNWVRQAPGKGLEWVARIRSKYNNYATYYADSVKDRFTISRDDSKNTAYLQMNNLKTEDTAVYYCVRHGNFGNSYISYWAYWGQGTLVTVSSGGGGSGGGGSGGGGSQTVVTQEPSLTVSPGGTVTLTCGSSTGAVTSGNYPNWVQQKPGQAPRGLIGGTKFLAPGTPARFSGSLLGGKAALTLSGVQPEDEAEYYCVLWYSNRWVFGGGTKLTVL

SEQ ID NO: 571 - protein, 7 aa, Artificial Sequence
  Synthetic
NVRMGVS

SEQ ID NO: 572 - protein, 16 aa, Artificial Sequence
  Synthetic
HIFSNDEKSYSTSLKS

SEQ ID NO: 573 - protein, 14 aa, Artificial Sequence
  Synthetic
MPEYSSGWSGAFDI

SEQ ID NO: 574 - protein, 11 aa, Artificial Sequence
  Synthetic
RASQDIRDDLV

SEQ ID NO: 575 - protein, 7 aa, Artificial Sequence
  Synthetic
AASTLQS

SEQ ID NO: 576 - protein, 9 aa, Artificial Sequence
  Synthetic
LQHHSYPWT

SEQ ID NO: 577 - protein, 124 aa, Artificial Sequence
  Synthetic
QVTLKESGPALVKPTETLTLTCTVSGFSLRNVRMGVSWIRQPPGKALEWLAHIFSNDEKSYSTSLKSRLTISKDTSKSQVVLILTNMDPVDTATYFCARMPEYSSGWSGAFDIWGQGTMVTVSS

SEQ ID NO: 578 - protein, 107 aa, Artificial Sequence
  Synthetic
DIQMTQSPSSLSASVGDRVTITCRASQDIRDDLVWYQQKPGKAPKRLIYAASTLQSGVPSRFSGSGSGTEFTLTISSLQPEDFATYYCLQHHSYPWTFGQGTKVEIK

SEQ ID NO: 579 - protein, 246 aa, Artificial Sequence
  Synthetic
QVTLKESGPALVKPTETLTLTCTVSGFSLRNVRMGVSWIRQPPGKALEWLAHIFSNDEKSYSTSLKSRLTISKDTSKSQVVLILTNMDPVDTATYFCARMPEYSSGWSGAFDIWGQGTMVTVSSGGGGSGGGGSGGGGSDIQMTQSPSSLSASVGDRVTITCRASQDIRDDLVWYQQKPGKAPKRLIYAASTLQSGVPSRFSGSGSGTEFTLTISSLQPEDFATYYCLQHHSYPWTFGQGTKVEIK

SEQ ID NO: 580 - protein, 501 aa, Artificial Sequence
  Synthetic
QVTLKESGPALVKPTETLTLTCTVSGFSLRNVRMGVSWIRQPPGKALEWLAHIFSNDEKSYSTSLKSRLTISKDTSKSQVVLILTNMDPVDTATYFCARMPEYSSGWSGAFDIWGQGTMVTVSSGGGGSGGGGSGGGGSDIQMTQSPSSLSASVGDRVTITCRASQDIRDDLVWYQQKPGKAPKRLIYAASTLQSGVPSRFSGSGSGTEFTLTISSLQPEDFATYYCLQHHSYPWTFGQGTKVEIKSGGGGSEVQLVESGGGLVQPGGSLKLSCAASGFTFNKYAMNWVRQAPGKGLEWVARIRSKYNNYATYYADSVKDRFTISRDDSKNTAYLQMNNLKTEDTAVYYCVRHGNFGNSYISYWAYWGQGTLVTVSSGGGGSGGGGSGGGGSQTVVTQEPSLTVSPGGTVTLTCGSSTGAVTSGNYPNWVQQKPGQAPRGLIGGTKFLAPGTPARFSGSLLGGKAALTLSGVQPEDEAEYYCVLWYSNRWVFGGGTKLTVL

SEQ ID NO: 581 - protein, 7 aa, Artificial Sequence
  Synthetic
NARMGVS

SEQ ID NO: 582 - protein, 16 aa, Artificial Sequence
  Synthetic
HIFSNDEKSYSTSLKS

SEQ ID NO: 583 - protein, 14 aa, Artificial Sequence
  Synthetic
MPEYSSGWSGAFDI

SEQ ID NO: 584 - protein, 11 aa, Artificial Sequence
  Synthetic
RASQDIRDDLG

SEQ ID NO: 585 - protein, 7 aa, Artificial Sequence
  Synthetic
AASTLQS

SEQ ID NO: 586 - protein, 9 aa, Artificial Sequence
  Synthetic
LQHNSFPFT

SEQ ID NO: 587 - protein, 124 aa, Artificial Sequence; identical to SEQ ID NO: 567
  Synthetic

SEQ ID NO: 588 - protein, 107 aa, Artificial Sequence
  Synthetic
DIQMTQSPSSLSASVGDRVTITCRASQDIRDDLGWYQQKPGKAPKRLIYAASTLQSGVPSRFTGGGSGTEFTLTISSLQPEDFATYYCLQHNSFPFTFGGGTKVEIK

SEQ ID NO: 589 - protein, 246 aa, Artificial Sequence
  Synthetic
QVTLKESGPALVKPTETLTLTCTVSGFSFRNARMGVSWIRQPPGKALEWLAHIFSNDEKSYSTSLKSRLTISKDTSKSQVVLTLTNMDPVDTATYFCARMPEYSSGWSGAFDIWGQGTMVTVSSGGGGSGGGGSGGGGSDIQMTQSPSSLSASVGDRVTITCRASQDIRDDLGWYQQKPGKAPKRLIYAASTLQSGVPSRFTGGGSGTEFTLTISSLQPEDFATYYCLQHNSFPFTFGGGTKVEIK

SEQ ID NO: 590 - protein, 501 aa, Artificial Sequence
  Synthetic
QVTLKESGPALVKPTETLTLTCTVSGFSFRNARMGVSWIRQPPGKALEWLAHIFSNDEKSYSTSLKSRLTISKDTSKSQVVLTLTNMDPVDTATYFCARMPEYSSGWSGAFDIWGQGTMVTVSSGGGGSGGGGSGGGGSDIQMTQSPSSLSASVGDRVTITCRASQDIRDDLGWYQQKPGKAPKRLIYAASTLQSGVPSRFTGGGSGTEFTLTISSLQPEDFATYYCLQHNSFPFTFGGGTKVEIKSGGGGSEVQLVESGGGLVQPGGSLKLSCAASGFTFNKYAMNWVRQAPGKGLEWVARIRSKYNNYATYYADSVKDRFTISRDDSKNTAYLQMNNLKTEDTAVYYCVRHGNFGNSYISYWAYWGQGTLVTVSSGGGGSGGGGSGGGGSQTVVTQEPSLTVSPGGTVTLTCGSSTGAVTSGNYPNWVQQKPGQAPRGLIGGTKFLAPGTPARFSGSLLGGKAALTLSGVQPEDEAEYYCVLWYSNRWVFGGGTKLTVL

SEQ ID NO: 591 - protein, 7 aa, Artificial Sequence
  Synthetic
NARMGVS

SEQ ID NO: 592 - protein, 16 aa, Artificial Sequence
  Synthetic
HIFSNDEKSYSTSLKS

SEQ ID NO: 593 - protein, 14 aa, Artificial Sequence
  Synthetic
MPEYSSGWSGAFDI

SEQ ID NO: 594 - protein, 11 aa, Artificial Sequence
  Synthetic
RASQGIRNDLV

SEQ ID NO: 595 - protein, 7 aa, Artificial Sequence
  Synthetic
GTSTLQS

SEQ ID NO: 596 - protein, 9 aa, Artificial Sequence
  Synthetic
LQHNSYPLT

SEQ ID NO: 597 - protein, 124 aa, Artificial Sequence; identical to SEQ ID NO: 437
  Synthetic

SEQ ID NO: 598 - protein, 107 aa, Artificial Sequence
  Synthetic
DIQMTQSPSSLSASVGDRVTITCRASQGIRNDLVWYQQKPGKAPKRLIYGTSTLQSGVPSRFSGSGSGTEFTLTISSLQPEDFATYYCLQHNSYPLTFGGGTKVEIK

SEQ ID NO: 599 - protein, 246 aa, Artificial Sequence
  Synthetic
QVTLKESGPVLVKPTETLTLTCTVSGFSFRNARMGVSWIRQPPGKALEWLAHIFSNDEKSYSTSLKSRLTISKDTSKSQVVLTLTNMDPVDTATYFCARMPEYSSGWSGAFDIWGQGTMVTVSSGGGGSGGGGSGGGGSDIQMTQSPSSLSASVGDRVTITCRASQGIRNDLVWYQQKPGKAPKRLIYGTSTLQSGVPSRFSGSGSGTEFTLTISSLQPEDFATYYCLQHNSYPLTFGGGTKVEIK

SEQ ID NO: 600 - protein, 501 aa, Artificial Sequence
  Synthetic
QVTLKESGPVLVKPTETLTLTCTVSGFSFRNARMGVSWIRQPPGKALEWLAHIFSNDEKSYSTSLKSRLTISKDTSKSQVVLTLTNMDPVDTATYFCARMPEYSSGWSGAFDIWGQGTMVTVSSGGGGSGGGGSGGGGSDIQMTQSPSSLSASVGDRVTITCRASQGIRNDLVWYQQKPGKAPKRLIYGTSTLQSGVPSRFSGSGSGTEFTLTISSLQPEDFATYYCLQHNSYPLTFGGGTKVEIKSGGGGSEVQLVESGGGLVQPGGSLKLSCAASGFTFNKYAMNWVRQAPGKGLEWVARIRSKYNNYATYYADSVKDRFTISRDDSKNTAYLQMNNLKTEDTAVYYCVRHGNFGNSYISYWAYWGQGTLVTVSSGGGGSGGGGSGGGGSQTVVTQEPSLTVSPGGTVTLTCGSSTGAVTSGNYPNWVQQKPGQAPRGLIGGTKFLAPGTPARFSGSLLGGKAALTLSGVQPEDEAEYYCVLWYSNRWVFGGGTKLTVL

SEQ ID NO: 601 - protein, 7 aa, Artificial Sequence
  Synthetic
NARMGVS

SEQ ID NO: 602 - protein, 16 aa, Artificial Sequence
  Synthetic
HIFSNDEKSYSTSLKS

SEQ ID NO: 603 - protein, 14 aa, Artificial Sequence
  Synthetic
MPEYSSGWSGAFDI

SEQ ID NO: 604 - protein, 11 aa, Artificial Sequence
  Synthetic
RTSQGIRNDLV

SEQ ID NO: 605 - protein, 7 aa, Artificial Sequence
  Synthetic
AASTLQS

SEQ ID NO: 606 - protein, 9 aa, Artificial Sequence
  Synthetic
LQHYSYPLT

SEQ ID NO: 607 - protein, 124 aa, Artificial Sequence; identical to SEQ ID NO: 437
  Synthetic

SEQ ID NO: 608 - protein, 107 aa, Artificial Sequence
  Synthetic
DIQMTQSPSSLSASVGDRVTITCRTSQGIRNDLVWYQQKPGKAPKRLIYAASTLQSGVPSRFSGSGSGTEFTLTISSLQPEDFATYFCLQHYSYPLTFGGGTKVEIK

SEQ ID NO: 609 - protein, 246 aa, Artificial Sequence
  Synthetic
QVTLKESGPVLVKPTETLTLTCTVSGFSFRNARMGVSWIRQPPGKALEWLAHIFSNDEKSYSTSLKSRLTISKDTSKSQVVLTLTNMDPVDTATYFCARMPEYSSGWSGAFDIWGQGTMVTVSSGGGGSGGGGSGGGGSDIQMTQSPSSLSASVGDRVTITCRTSQGIRNDLVWYQQKPGKAPKRLIYAASTLQSGVPSRFSGSGSGTEFTLTISSLQPEDFATYFCLQHYSYPLTFGGGTKVEIK

SEQ ID NO: 610 - protein, 501 aa, Artificial Sequence
  Synthetic
QVTLKESGPVLVKPTETLTLTCTVSGFSFRNARMGVSWIRQPPGKALEWLAHIFSNDEKSYSTSLKSRLTISKDTSKSQVVLTLTNMDPVDTATYFCARMPEYSSGWSGAFDIWGQGTMVTVSSGGGGSGGGGSGGGGSDIQMTQSPSSLSASVGDRVTITCRTSQGIRNDLVWYQQKPGKAPKRLIYAASTLQSGVPSRFSGSGSGTEFTLTISSLQPEDFATYFCLQHYSYPLTFGGGTKVEIKSGGGGSEVQLVESGGGLVQPGGSLKLSCAASGFTFNKYAMNWVRQAPGKGLEWVARIRSKYNNYATYYADSVKDRFTISRDDSKNTAYLQMNNLKTEDTAVYYCVRHGNFGNSYISYWAYWGQGTLVTVSSGGGGSGGGGSGGGGSQTVVTQEPSLTVSPGGTVTLTCGSSTGAVTSGNYPNWVQQKPGQAPRGLIGGTKFLAPGTPARFSGSLLGGKAALTLSGVQPEDEAEYYCVLWYSNRWVFGGGTKLTVL

SEQ ID NO: 611 - protein, 7 aa, Artificial Sequence
  Synthetic
NARMGVS

SEQ ID NO: 612 - protein, 16 aa, Artificial Sequence
  Synthetic
HIFSNDEKSYSTSLKS

SEQ ID NO: 613 - protein, 14 aa, Artificial Sequence
  Synthetic
MPEYSSGWSGAFDI

SEQ ID NO: 614 - protein, 11 aa, Artificial Sequence
  Synthetic
RASQGIGDDLG

SEQ ID NO: 615 - protein, 7 aa, Artificial Sequence
  Synthetic
ATSVLQS

SEQ ID NO: 616 - protein, 9 aa, Artificial Sequence
  Synthetic
LQHNSYPLT

SEQ ID NO: 617 - protein, 124 aa, Artificial Sequence; identical to SEQ ID NO: 437
  Synthetic

SEQ ID NO: 618 - protein, 107 aa, Artificial Sequence
  Synthetic
DIQMTQSPSSLSASVGDRVTITCRASQGIGDDLGWYQQIPGKAPKRLIYATSVLQSGVPSRFSGSGSGTEFTLTISSLQPEDFATYYCLQHNSYPLTFGGGTKVEIK

SEQ ID NO: 619 - protein, 246 aa, Artificial Sequence
  Synthetic
QVTLKESGPVLVKPTETLTLTCTVSGFSFRNARMGVSWIRQPPGKALEWLAHIFSNDEKSYSTSLKSRLTISKDTSKSQVVLTLTNMDPVDTATYFCARMPEYSSGWSGAFDIWGQGTMVTVSSGGGGSGGGGSGGGGSDIQMTQSPSSLSASVGDRVTITCRASQGIGDDLGWYQQIPGKAPKRLIYATSVLQSGVPSRFSGSGSGTEFTLTISSLQPEDFATYYCLQHNSYPLTFGGGTKVEIK

SEQ ID NO: 620 - protein, 501 aa, Artificial Sequence
  Synthetic
QVTLKESGPVLVKPTETLTLTCTVSGFSFRNARMGVSWIRQPPGKALEWLAHIFSNDEKSYSTSLKSRLTISKDTSKSQVVLTLTNMDPVDTATYFCARMPEYSSGWSGAFDIWGQGTMVTVSSGGGGSGGGGSGGGGSDIQMTQSPSSLSASVGDRVTITCRASQGIGDDLGWYQQIPGKAPKRLIYATSVLQSGVPSRFSGSGSGTEFTLTISSLQPEDFATYYCLQHNSYPLTFGGGTKVEIKSGGGGSEVQLVESGGGLVQPGGSLKLSCAASGFTFNKYAMNWVRQAPGKGLEWVARIRSKYNNYATYYADSVKDRFTISRDDSKNTAYLQMNNLKTEDTAVYYCVRHGNFGNSYISYWAYWGQGTLVTVSSGGGGSGGGGSGGGGSQTVVTQEPSLTVSPGGTVTLTCGSSTGAVTSGNYPNWVQQKPGQAPRGLIGGTKFLAPGTPARFSGSLLGGKAALTLSGVQPEDEAEYYCVLWYSNRWVFGGGTKLTVL

SEQ ID NO: 621 - protein, 7 aa, Artificial Sequence
  Synthetic
NARMGVS

SEQ ID NO: 622 - protein, 16 aa, Artificial Sequence
  Synthetic
HIFSNDEKSYRTSLKS

SEQ ID NO: 623 - protein, 14 aa, Artificial Sequence
  Synthetic
IVGYGSGWYAYFDY

SEQ ID NO: 624 - protein, 11 aa, Artificial Sequence
  Synthetic
RASQGIRNDLG

SEQ ID NO: 625 - protein, 7 aa, Artificial Sequence
  Synthetic
AASSLQS

SEQ ID NO: 626 - protein, 9 aa, Artificial Sequence
  Synthetic
LQHNSYPLT

SEQ ID NO: 627 - protein, 124 aa, Artificial Sequence
  Synthetic
QVTLKESGPALVKPTQTLTLTCTFSGFSLSNARMGVSWIRQPPGKALEWLAHIFSNDEKSYRTSLKSRLTISKDTSKSQVVLTMTNMDPVDTATYYCARIVGYGSGWYAYFDYWGQGTLVTVSS

SEQ ID NO: 628 - protein, 107 aa, Artificial Sequence
  Synthetic
DIQMTQSPSSLSASVGDRVTITCRASQGIRNDLGWYQQKPGKAPKRLIYAASSLQSGVPSRFSGSGSGTEFTLTISSLQPEDFATYYCLQHNSYPLTFGGGTKVEIK

SEQ ID NO: 629 - protein, 246 aa, Artificial Sequence
  Synthetic
QVTLKESGPALVKPTQTLTLTCTFSGFSLSNARMGVSWIRQPPGKALEWLAHIFSNDEKSYRTSLKSRLTISKDTSKSQVVLTMTNMDPVDTATYYCARIVGYGSGWYAYFDYWGQGTLVTVSSGGGGSGGGGSGGGGSDIQMTQSPSSLSASVGDRVTITCRASQGIRNDLGWYQQKPGKAPKRLIYAASSLQSGVPSRFSGSGSGTEFTLTISSLQPEDFATYYCLQHNSYPLTFGGGTKVEIK

SEQ ID NO: 630 - protein, 501 aa, Artificial Sequence
  Synthetic
QVTLKESGPALVKPTQTLTLTCTFSGFSLSNARMGVSWIRQPPGKALEWLAHIFSNDEKSYRTSLKSRLTISKDTSKSQVVLTMTNMDPVDTATYYCARIVGYGSGWYAYFDYWGQGTLVTVSSGGGGSGGGGSGGGGSDIQMTQSPSSLSASVGDRVTITCRASQGIRNDLGWYQQKPGKAPKRLIYAASSLQSGVPSRFSGSGSGTEFTLTISSLQPEDFATYYCLQHNSYPLTFGGGTKVEIKSGGGGSEVQLVESGGGLVQPGGSLKLSCAASGFTFNKYAMNWVRQAPGKGLEWVARIRSKYNNYATYYADSVKDRFTISRDDSKNTAYLQMNNLKTEDTAVYYCVRHGNFGNSYISYWAYWGQGTLVTVSSGGGGSGGGGSGGGGSQTVVTQEPSLTVSPGGTVTLTCGSSTGAVTSGNYPNWVQQKPGQAPRGLIGGTKFLAPGTPARFSGSLLGGKAALTLSGVQPEDEAEYYCVLWYSNRWVFGGGTKLTVL

SEQ ID NO: 631 - protein, 7 aa, Artificial Sequence
  Synthetic
NARMGVS

SEQ ID NO: 632 - protein, 16 aa, Artificial Sequence
  Synthetic
LIYWNDDKRYSPSLKS

SEQ ID NO: 633 - protein, 14 aa, Artificial Sequence
  Synthetic
MVGYGSGWYAYFDY

SEQ ID NO: 634 - protein, 11 aa, Artificial Sequence
  Synthetic
RASQGIRNDLG

SEQ ID NO: 635 - protein, 7 aa, Artificial Sequence
  Synthetic
AASSLQS

SEQ ID NO: 636 - protein, 9 aa, Artificial Sequence
  Synthetic
LQHNSYPLT

SEQ ID NO: 637 - protein, 124 aa, Artificial Sequence
  Synthetic
QVTLKESGPVLVKPTQTLTLTCTFSGFSLSNARMGVSWIRQPPGKALEWLALIYWNDDKRYSPSLKSRLTITKDTSKNQVVLTMTNMDPVDTATYYCARMVGYGSGWYAYFDYWGQGTLVTVSS

SEQ ID NO: 638 - protein, 107 aa, Artificial Sequence; identical to SEQ ID NO: 628
  Synthetic

SEQ ID NO: 639 - protein, 246 aa, Artificial Sequence
  Synthetic
QVTLKESGPVLVKPTQTLTLTCTFSGFSLSNARMGVSWIRQPPGKALEWLALIYWNDDKRYSPSLKSRLTITKDTSKNQVVLTMTNMDPVDTATYYCARMVGYGSGWYAYFDYWGQGTLVTVSSGGGGSGGGGSGGGGSDIQMTQSPSSLSASVGDRVTITCRASQGIRNDLGWYQQKPGKAPKRLIYAASSLQSGVPSRFSGSGSGTEFTLTISSLQPEDFATYYCLQHNSYPLTFGGGTKVEIK

SEQ ID NO: 640 - protein, 501 aa, Artificial Sequence
  Synthetic
QVTLKESGPVLVKPTQTLTLTCTFSGFSLSNARMGVSWIRQPPGKALEWLALIYWNDDKRYSPSLKSRLTITKDTSKNQVVLTMTNMDPVDTATYYCARMVGYGSGWYAYFDYWGQGTLVTVSSGGGGSGGGGSGGGGSDIQMTQSPSSLSASVGDRVTITCRASQGIRNDLGWYQQKPGKAPKRLIYAASSLQSGVPSRFSGSGSGTEFTLTISSLQPEDFATYYCLQHNSYPLTFGGGTKVEIKSGGGGSEVQLVESGGGLVQPGGSLKLSCAASGFTFNKYAMNWVRQAPGKGLEWVARIRSKYNNYATYYADSVKDRFTISRDDSKNTAYLQMNNLKTEDTAVYYCVRHGNFGNSYISYWAYWGQGTLVTVSSGGGGSGGGGSGGGGSQTVVTQEPSLTVSPGGTVTLTCGSSTGAVTSGNYPNWVQQKPGQAPRGLIGGTKFLAPGTPARFSGSLLGGKAALTLSGVQPEDEAEYYCVLWYSNRWVFGGGTKLTVL

SEQ ID NO: 641 - protein, 7 aa, Artificial Sequence
  Synthetic
NARMGVS

SEQ ID NO: 642 - protein, 16 aa, Artificial Sequence
  Synthetic
HIFSNDEKSYSTSLKS

SEQ ID NO: 643 - protein, 14 aa, Artificial Sequence
  Synthetic
IVGYGTGWYGFFDY

SEQ ID NO: 644 - protein, 11 aa, Artificial Sequence
  Synthetic
RTSQGIRNDLG

SEQ ID NO: 645 - protein, 7 aa, Artificial Sequence
  Synthetic
AASSLQS

SEQ ID NO: 646 - protein, 9 aa, Artificial Sequence
  Synthetic
LQHNSYPLT

SEQ ID NO: 647 - protein, 124 aa, Artificial Sequence
  Synthetic
QVTLKESGPALVKPTQTLTLTCTFSGFSLSNARMGVSWIRQPPGKALEWLAHIFSNDEKSYSTSLKSRLTISKDTSKSQVVLTMTDMDPEDTATYYCARIVGYGTGWYGFFDYWGQGILVTVSS

SEQ ID NO: 648 - protein, 107 aa, Artificial Sequence
  Synthetic
DIQMTQSPSSLSASVGDRVTITCRTSQGIRNDLGWYQQKPGKAPKRLIYAASSLQSGVPSRFSGSGSGTEFTLTISSLQPEDFATYYCLQHNSYPLTFGGGTKVEIK

SEQ ID NO: 649 - protein, 246 aa, Artificial Sequence
  Synthetic
QVTLKESGPALVKPTQTLTLTCTFSGFSLSNARMGVSWIRQPPGKALEWLAHIFSNDEKSYSTSLKSRLTISKDTSKSQVVLTMTDMDPEDTATYYCARIVGYGTGWYGFFDYWGQGILVTVSSGGGGSGGGGSGGGGSDIQMTQSPSSLSASVGDRVTITCRTSQGIRNDLGWYQQKPGKAPKRLIYAASSLQSGVPSRFSGSGSGTEFTLTISSLQPEDFATYYCLQHNSYPLTFGGGTKVEIK

SEQ ID NO: 650 - protein, 501 aa, Artificial Sequence
  Synthetic
QVTLKESGPALVKPTQTLTLTCTFSGFSLSNARMGVSWIRQPPGKALEWLAHIFSNDEKSYSTSLKSRLTISKDTSKSQVVLTMTDMDPEDTATYYCARIVGYGTGWYGFFDYWGQGILVTVSSGGGGSGGGGSGGGGSDIQMTQSPSSLSASVGDRVTITCRTSQGIRNDLGWYQQKPGKAPKRLIYAASSLQSGVPSRFSGSGSGTEFTLTISSLQPEDFATYYCLQHNSYPLTFGGGTKVEIKSGGGGSEVQLVESGGGLVQPGGSLKLSCAASGFTFNKYAMNWVRQAPGKGLEWVARIRSKYNNYATYYADSVKDRFTISRDDSKNTAYLQMNNLKTEDTAVYYCVRHGNFGNSYISYWAYWGQGTLVTVSSGGGGSGGGGSGGGGSQTVVTQEPSLTVSPGGTVTLTCGSSTGAVTSGNYPNWVQQKPGQAPRGLIGGTKFLAPGTPARFSGSLLGGKAALTLSGVQPEDEAEYYCVLWYSNRWVFGGGTKLTVL

SEQ ID NO: 651 - protein, 7 aa, Artificial Sequence
  Synthetic
NARMGVS

SEQ ID NO: 652 - protein, 16 aa, Artificial Sequence
  Synthetic
HIFSNDEKSYSTSLKS

SEQ ID NO: 653 - protein, 14 aa, Artificial Sequence
  Synthetic
IVGYGSGWYGYFDY

SEQ ID NO: 654 - protein, 11 aa, Artificial Sequence
  Synthetic
RASQGIRNDLV

SEQ ID NO: 655 - protein, 7 aa, Artificial Sequence
  Synthetic
AASTLQS

SEQ ID NO: 656 - protein, 9 aa, Artificial Sequence
  Synthetic
LQHYSYPLT

SEQ ID NO: 657 - protein, 124 aa, Artificial Sequence
  Synthetic
QVTLKESGPTLVKPTETLTLTCTVSGFSFRNARMGVSWIRQPPGKALEWLAHIFSNDEKSYSTSLKSRLTISKDTSKGQVVLTMTNMDPVDTATYYCARIVGYGSGWYGYFDYWGQGTLVTVSS

SEQ ID NO: 658 - protein, 107 aa, Artificial Sequence
  Synthetic
DIQMTQSPSSLSASVGDRVTITCRASQGIRNDLVWYQQKPGKAPKRLIYAASTLQSGVPSRFSGSGSGTEFILTISSLQPEDFATYFCLQHYSYPLTFGGGTKLEIK

SEQ ID NO: 659 - protein, 246 aa, Artificial Sequence
  Synthetic
QVTLKESGPTLVKPTETLTLTCTVSGFSFRNARMGVSWIRQPPGKALEWLAHIFSNDEKSYSTSLKSRLTISKDTSKGQVVLTMTNMDPVDTATYYCARIVGYGSGWYGYFDYWGQGTLVTVSSGGGGSGGGGSGGGGSDIQMTQSPSSLSASVGDRVTITCRASQGIRNDLVWYQQKPGKAPKRLIYAASTLQSGVPSRFSGSGSGTEFILTISSLQPEDFATYFCLQHYSYPLTFGGGTKLEIK

SEQ ID NO: 660 - protein, 501 aa, Artificial Sequence
  Synthetic
QVTLKESGPTLVKPTETLTLTCTVSGFSFRNARMGVSWIRQPPGKALEWLAHIFSNDEKSYSTSLKSRLTISKDTSKGQVVLTMTNMDPVDTATYYCARIVGYGSGWYGYFDYWGQGTLVTVSSGGGGSGGGGSGGGGSDIQMTQSPSSLSASVGDRVTITCRASQGIRNDLVWYQQKPGKAPKRLIYAASTLQSGVPSRFSGSGSGTEFILTISSLQPEDFATYFCLQHYSYPLTFGGGTKLEIKSGGGGSEVQLVESGGGLVQPGGSLKLSCAASGFTFNKYAMNWVRQAPGKGLEWVARIRSKYNNYATYYADSVKDRFTISRDDSKNTAYLQMNNLKTEDTAVYYCVRHGNFGNSYISYWAYWGQGTLVTVSSGGGGSGGGGSGGGGSQTVVTQEPSLTVSPGGTVTLTCGSSTGAVTSGNYPNWVQQKPGQAPRGLIGGTKFLAPGTPARFSGSLLGGKAALTLSGVQPEDEAEYYCVLWYSNRWVFGGGTKLTVL

SEQ ID NO: 661 - protein, 7 aa, Artificial Sequence
  Synthetic
NARMGVS

SEQ ID NO: 662 - protein, 16 aa, Artificial Sequence
  Synthetic
HIFSNDEKSYSTSLKS

SEQ ID NO: 663 - protein, 14 aa, Artificial Sequence
  Synthetic
IVGYGSGWYGYFDY

SEQ ID NO: 664 - protein, 11 aa, Artificial Sequence
  Synthetic
RASQGIGDDLG

SEQ ID NO: 665 - protein, 7 aa, Artificial Sequence
  Synthetic
ATSVLQS

SEQ ID NO: 666 - protein, 9 aa, Artificial Sequence
  Synthetic
LQHNSYPLT

SEQ ID NO: 667 - protein, 124 aa, Artificial Sequence
  Synthetic
QVTLKESGPVLVKPTETLTLTCTVSGFSLRNARMGVSWIRQPPGKTLEWLAHIFSNDEKSYSTSLKSRLTISKDTSKGQVVLTMTNMDPVDTATYYCARIVGYGSGWYGYFDYWGQGTLVTVSS

SEQ ID NO: 668 - protein, 107 aa, Artificial Sequence
  Synthetic
DIQMTQSPSSLSASVGDRVTITCRASQGIGDDLGWYQQIPGKAPKRLIYATSVLQSGVPSRFSGSGSGTEFTLTISSLQPEDFATYYCLQHNSYPLTFGGGTKLEIK

SEQ ID NO: 669 - protein, 246 aa, Artificial Sequence
  Synthetic
QVTLKESGPVLVKPTETLTLTCTVSGFSLRNARMGVSWIRQPPGKTLEWLAHIFSNDEKSYSTSLKSRLTISKDTSKGQVVLTMTNMDPVDTATYYCARIVGYGSGWYGYFDYWGQGTLVTVSSGGGGSGGGGSGGGGSDIQMTQSPSSLSASVGDRVTITCRASQGIGDDLGWYQQIPGKAPKRLIYATSVLQSGVPSRFSGSGSGTEFTLTISSLQPEDFATYYCLQHNSYPLTFGGGTKLEIK

SEQ ID NO: 670 - protein, 501 aa, Artificial Sequence
  Synthetic
QVTLKESGPVLVKPTETLTLTCTVSGFSLRNARMGVSWIRQPPGKTLEWLAHIFSNDEKSYSTSLKSRLTISKDTSKGQVVLTMTNMDPVDTATYYCARIVGYGSGWYGYFDYWGQGTLVTVSSGGGGSGGGGSGGGGSDIQMTQSPSSLSASVGDRVTITCRASQGIGDDLGWYQQIPGKAPKRLIYATSVLQSGVPSRFSGSGSGTEFTLTISSLQPEDFATYYCLQHNSYPLTFGGGTKLEIKSGGGGSEVQLVESGGGLVQPGGSLKLSCAASGFTFNKYAMNWVRQAPGKGLEWVARIRSKYNNYATYYADSVKDRFTISRDDSKNTAYLQMNNLKTEDTAVYYCVRHGNFGNSYISYWAYWGQGTLVTVSSGGGGSGGGGSGGGGSQTVVTQEPSLTVSPGGTVTLTCGSSTGAVTSGNYPNWVQQKPGQAPRGLIGGTKFLAPGTPARFSGSLLGGKAALTLSGVQPEDEAEYYCVLWYSNRWVFGGGTKLTVL

SEQ ID NO: 671 - protein, 7 aa, Artificial Sequence
  Synthetic
NARMGVS

SEQ ID NO: 672 - protein, 16 aa, Artificial Sequence
  Synthetic
HIFWNDEKSYSTSLKS

SEQ ID NO: 673 - protein, 15 aa, Artificial Sequence
  Synthetic
IPYYGSGSYNYGMDV

SEQ ID NO: 674 - protein, 11 aa, Artificial Sequence
  Synthetic
RASQGIRNDLG

SEQ ID NO: 675 - protein, 7 aa, Artificial Sequence
  Synthetic
AASSLQS

SEQ ID NO: 676 - protein, 9 aa, Artificial Sequence
  Synthetic
LQHNSYPLT

SEQ ID NO: 677 - protein, 125 aa, Artificial Sequence
  Synthetic
QVTLKESGPALVKPTETLTLTCTFSGFSLRNARMGVSWIRQPPGKALEWLAHIFWNDEKSYSTSLKSRLTISKDTSKSQVVLTMTNMDPVDTATYYCARIPYYGSGSYNYGMDVWGQGTTVTVSS

SEQ ID NO: 678 - protein, 107 aa, Artificial Sequence
  Synthetic
DIQMTQSPSSLSASVGDRVTITCRASQGIRNDLGWYQQKPGKAPKRLIYAASSLQSGVPSRFSGSGSGTEFTLTISSLQPEDFATYYCLQHNSYPLTFGGGTKLEIK

SEQ ID NO: 679 - protein, 247 aa, Artificial Sequence
  Synthetic
QVTLKESGPALVKPTETLTLTCTFSGFSLRNARMGVSWIRQPPGKALEWLAHIFWNDEKSYSTSLKSRLTISKDTSKSQVVLTMTNMDPVDTATYYCARIPYYGSGSYNYGMDVWGQGTTVTVSSGGGGSGGGGSGGGGSDIQMTQSPSSLSASVGDRVTITCRASQGIRNDLGWYQQKPGKAPKRLIYAASSLQSGVPSRFSGSGSGTEFTLTISSLQPEDFATYYCLQHNSYPLTFGGGTKLEIK

SEQ ID NO: 680 - protein, 502 aa, Artificial Sequence
  Synthetic
QVTLKESGPALVKPTETLTLTCTFSGFSLRNARMGVSWIRQPPGKALEWLAHIFWNDEKSYSTSLKSRLTISKDTSKSQVVLTMTNMDPVDTATYYCARIPYYGSGSYNYGMDVWGQGTTVTVSSGGGGSGGGGSGGGGSDIQMTQSPSSLSASVGDRVTITCRASQGIRNDLGWYQQKPGKAPKRLIYAASSLQSGVPSRFSGSGSGTEFTLTISSLQPEDFATYYCLQHNSYPLTFGGGTKLEIKSGGGGSEVQLVESGGGLVQPGGSLKLSCAASGFTFNKYAMNWVRQAPGKGLEWVARIRSKYNNYATYYADSVKDRFTISRDDSKNTAYLQMNNLKTEDTAVYYCVRHGNFGNSYISYWAYWGQGTLVTVSSGGGGSGGGGSGGGGSQTVVTQEPSLTVSPGGTVTLTCGSSTGAVTSGNYPNWVQQKPGQAPRGLIGGTKFLAPGTPARFSGSLLGGKAALTLSGVQPEDEAEYYCVLWYSNRWVFGGGTKLTVL

SEQ ID NO: 681 - protein, 7 aa, Artificial Sequence
  Synthetic
NARMGVS

SEQ ID NO: 682 - protein, 16 aa, Artificial Sequence
  Synthetic
HIFSNDEKSYSTSLKN

SEQ ID NO: 683 - protein, 14 aa, Artificial Sequence
  Synthetic
IVGYGTGWYGFFDY

SEQ ID NO: 684 - protein, 11 aa, Artificial Sequence
  Synthetic
RASQDIRDDLV

SEQ ID NO: 685 - protein, 7 aa, Artificial Sequence
  Synthetic
GTSTLQS

SEQ ID NO: 686 - protein, 9 aa, Artificial Sequence
  Synthetic
LQHHSYPLT

SEQ ID NO: 687 - protein, 124 aa, Artificial Sequence
  Synthetic
QVTLKESGPALVKPTETLTLTCTVSGFSLNNARMGVSWIRQPPGKALEWLAHIFSNDEKSYSTSLKNRLTISKDSSKTQVVLTMTNVDPVDTATYYCARIVGYGTGWYGFFDYWGQGTQVTVSS

SEQ ID NO: 688 - protein, 107 aa, Artificial Sequence
  Synthetic
DIQMTQSPSSLSASVGDRVTITCRASQDIRDDLVWYQQKPGKAPKRLIYGTSTLQSGVPSRFSGSGSGTEFTLTISSLQPEDFATYYCLQHHSYPLTFGGGTKLEIK

SEQ ID NO: 689 - protein, 246 aa, Artificial Sequence
  Synthetic
QVTLKESGPALVKPTETLTLTCTVSGFSLNNARMGVSWIRQPPGKALEWLAHIFSNDEKSYSTSLKNRLTISKDSSKTQVVLTMTNVDPVDTATYYCARIVGYGTGWYGFFDYWGQGTQVTVSSGGGGSGGGGSGGGGSDIQMTQSPSSLSASVGDRVTITCRASQDIRDDLVWYQQKPGKAPKRLIYGTSTLQSGVPSRFSGSGSGTEFTLTISSLQPEDFATYYCLQHHSYPLTFGGGTKLEIK

SEQ ID NO: 690 - protein, 501 aa, Artificial Sequence
  Synthetic
QVTLKESGPALVKPTETLTLTCTVSGFSLNNARMGVSWIRQPPGKALEWLAHIFSNDEKSYSTSLKNRLTISKDSSKTQVVLTMTNVDPVDTATYYCARIVGYGTGWYGFFDYWGQGTQVTVSSGGGGSGGGGSGGGGSDIQMTQSPSSLSASVGDRVTITCRASQDIRDDLVWYQQKPGKAPKRLIYGTSTLQSGVPSRFSGSGSGTEFTLTISSLQPEDFATYYCLQHHSYPLTFGGGTKLEIKSGGGGSEVQLVESGGGLVQPGGSLKLSCAASGFTFNKYAMNWVRQAPGKGLEWVARIRSKYNNYATYYADSVKDRFTISRDDSKNTAYLQMNNLKTEDTAVYYCVRHGNFGNSYISYWAYWGQGTLVTVSSGGGGSGGGGSGGGGSQTVVTQEPSLTVSPGGTVTLTCGSSTGAVTSGNYPNWVQQKPGQAPRGLIGGTKFLAPGTPARFSGSLLGGKAALTLSGVQPEDEAEYYCVLWYSNRWVFGGGTKLTVL

SEQ ID NO: 691 - protein, 7 aa, Artificial Sequence
  Synthetic
YARMGVS

SEQ ID NO: 692 - protein, 16 aa, Artificial Sequence
  Synthetic
HIFSNDEKSYSTSLKS

SEQ ID NO: 693 - protein, 14 aa, Artificial Sequence
  Synthetic
MPEYSSGWSGAFDI

SEQ ID NO: 694 - protein, 11 aa, Artificial Sequence
  Synthetic
RASQDIRNDLA

SEQ ID NO: 695 - protein, 7 aa, Artificial Sequence
  Synthetic
AASSLQS

SEQ ID NO: 696 - protein, 9 aa, Artificial Sequence
  Synthetic
LQHNSYPLT

SEQ ID NO: 697 - protein, 124 aa, Artificial Sequence
  Synthetic
QVTLKESGPTLVKPTETLTLTCTFSGFSLRYARMGVSWIRQPPGKALEWLAHIFSNDEKSYSTSLKSRLTISKDTSKSQVVLTLTNMDPVDTATYFCARMPEYSSGWSGAFDIWGQGTMVTVSS

SEQ ID NO: 698 - protein, 107 aa, Artificial Sequence
  Synthetic
DIQMTQSPSSLSASVGDRVTITCRASQDIRNDLAWYQQKPGKAPKRLIYAASSLQSGVPSRFSGSGSGTEFTLTISSLQPEDFATYYCLQHNSYPLTFGGGTKLEIK

SEQ ID NO: 699 - protein, 246 aa, Artificial Sequence
  Synthetic
QVTLKESGPTLVKPTETLTLTCTFSGFSLRYARMGVSWIRQPPGKALEWLAHIFSNDEKSYSTSLKSRLTISKDTSKSQVVLTLTNMDPVDTATYFCARMPEYSSGWSGAFDIWGQGTMVTVSSGGGGSGGGGSGGGGSDIQMTQSPSSLSASVGDRVTITCRASQDIRNDLAWYQQKPGKAPKRLIYAASSLQSGVPSRFSGSGSGTEFTLTISSLQPEDFATYYCLQHNSYPLTFGGGTKLEIK

SEQ ID NO: 700 - protein, 501 aa, Artificial Sequence
  Synthetic
QVTLKESGPTLVKPTETLTLTCTFSGFSLRYARMGVSWIRQPPGKALEWLAHIFSNDEKSYSTSLKSRLTISKDTSKSQVVLTLTNMDPVDTATYFCARMPEYSSGWSGAFDIWGQGTMVTVSSGGGGSGGGGSGGGGSDIQMTQSPSSLSASVGDRVTITCRASQDIRNDLAWYQQKPGKAPKRLIYAASSLQSGVPSRFSGSGSGTEFTLTISSLQPEDFATYYCLQHNSYPLTFGGGTKLEIKSGGGGSEVQLVESGGGLVQPGGSLKLSCAASGFTFNKYAMNWVRQAPGKGLEWVARIRSKYNNYATYYADSVKDRFTISRDDSKNTAYLQMNNLKTEDTAVYYCVRHGNFGNSYISYWAYWGQGTLVTVSSGGGGSGGGGSGGGGSQTVVTQEPSLTVSPGGTVTLTCGSSTGAVTSGNYPNWVQQKPGQAPRGLIGGTKFLAPGTPARFSGSLLGGKAALTLSGVQPEDEAEYYCVLWYSNRWVFGGGTKLTVL

SEQ ID NO: 701 - protein, 7 aa, Artificial Sequence
  Synthetic
NIKMGVS

SEQ ID NO: 702 - protein, 16 aa, Artificial Sequence
  Synthetic
HIFSNDEKSYSTSLKS

SEQ ID NO: 703 - protein, 14 aa, Artificial Sequence
  Synthetic
MPEYSSGWSGAFDI

SEQ ID NO: 704 - protein, 11 aa, Artificial Sequence
  Synthetic
RASQDISNYLA

SEQ ID NO: 705 - protein, 7 aa, Artificial Sequence
  Synthetic
AASSLQS

SEQ ID NO: 706 - protein, 9 aa, Artificial Sequence
  Synthetic
LQHNSFPLT

SEQ ID NO: 707 - protein, 124 aa, Artificial Sequence
  Synthetic
QVTLKESGPVLVKPTETLTLTCTVSGFSLRNIKMGVSWIRQPPGKALEWLAHIFSNDEKSYSTSLKSRLTISKDTSKSQVVLTLTNMDPVDTATYFCARMPEYSSGWSGAFDIWGQGTMVTVSS

SEQ ID NO: 708 - protein, 107 aa, Artificial Sequence
  Synthetic
DIQMTQSPSSLSASVGDRVTITCRASQDISNYLAWYQQKPGKAPKRLIYAASSLQSGVPSRFSGSGSGTEFTLTISSLQPEDFATYYCLQHNSFPLTFGGGTKLEIK

SEQ ID NO: 709 - protein, 246 aa, Artificial Sequence
  Synthetic
QVTLKESGPVLVKPTETLTLTCTVSGFSLRNIKMGVSWIRQPPGKALEWLAHIFSNDEKSYSTSLKSRLTISKDTSKSQVVLTLTNMDPVDTATYFCARMPEYSSGWSGAFDIWGQGTMVTVSSGGGGSGGGGSGGGGSDIQMTQSPSSLSASVGDRVTITCRASQDISNYLAWYQQKPGKAPKRLIYAASSLQSGVPSRFSGSGSGTEFTLTISSLQPEDFATYYCLQHNSFPLTFGGGTKLEIK

SEQ ID NO: 710 - protein, 501 aa, Artificial Sequence
  Synthetic
QVTLKESGPVLVKPTETLTLTCTVSGFSLRNIKMGVSWIRQPPGKALEWLAHIFSNDEKSYSTSLKSRLTISKDTSKSQVVLTLTNMDPVDTATYFCARMPEYSSGWSGAFDIWGQGTMVTVSSGGGGSGGGGSGGGGSDIQMTQSPSSLSASVGDRVTITCRASQDISNYLAWYQQKPGKAPKRLIYAASSLQSGVPSRFSGSGSGTEFTLTISSLQPEDFATYYCLQHNSFPLTFGGGTKLEIKSGGGGSEVQLVESGGGLVQPGGSLKLSCAASGFTFNKYAMNWVRQAPGKGLEWVARIRSKYNNYATYYADSVKDRFTISRDDSKNTAYLQMNNLKTEDTAVYYCVRHGNFGNSYISYWAYWGQGTLVTVSSGGGGSGGGGSGGGGSQTVVTQEPSLTVSPGGTVTLTCGSSTGAVTSGNYPNWVQQKPGQAPRGLIGGTKFLAPGTPARFSGSLLGGKAALTLSGVQPEDEAEYYCVLWYSNRWVFGGGTKLTVL

SEQ ID NO: 711 - protein, 7 aa, Artificial Sequence
  Synthetic
NARMGVS

SEQ ID NO: 712 - protein, 16 aa, Artificial Sequence
  Synthetic
HIFSNDEKSYSTSLKS

SEQ ID NO: 713 - protein, 14 aa, Artificial Sequence
  Synthetic
MPEYSSGWSGAFDI

SEQ ID NO: 714 - protein, 11 aa, Artificial Sequence
  Synthetic
RASQGIRNDLG

SEQ ID NO: 715 - protein, 7 aa, Artificial Sequence
  Synthetic
AASSLQS

SEQ ID NO: 716 - protein, 9 aa, Artificial Sequence
  Synthetic
LQHNSYPLT

SEQ ID NO: 717 - protein, 124 aa, Artificial Sequence
  Synthetic
QVTLKESGPVLVKPTETLTLTCTVSGFSFRNARMGVSWIRQPPGKALEWLAHIFSNDEKSYSTSLKSRLTISKDTSKSQVVLTLTNMDPVDTATYFCARMPEYSSGWSGAFDIWGQGTLVTVSS

SEQ ID NO: 718 - protein, 107 aa, Artificial Sequence; identical to SEQ ID NO: 678
  Synthetic

SEQ ID NO: 719 - protein, 246 aa, Artificial Sequence
  Synthetic
QVTLKESGPVLVKPTETLTLTCTVSGFSFRNARMGVSWIRQPPGKALEWLAHIFSNDEKSYSTSLKSRLTISKDTSKSQVVLTLTNMDPVDTATYFCARMPEYSSGWSGAFDIWGQGTLVTVSSGGGGSGGGGSGGGGSDIQMTQSPSSLSASVGDRVTITCRASQGIRNDLGWYQQKPGKAPKRLIYAASSLQSGVPSRFSGSGSGTEFTLTISSLQPEDFATYYCLQHNSYPLTFGGGTKLEIK

SEQ ID NO: 720 - protein, 501 aa, Artificial Sequence
  Synthetic
QVTLKESGPVLVKPTETLTLTCTVSGFSFRNARMGVSWIRQPPGKALEWLAHIFSNDEKSYSTSLKSRLTISKDTSKSQVVLTLTNMDPVDTATYFCARMPEYSSGWSGAFDIWGQGTLVTVSSGGGGSGGGGSGGGGSDIQMTQSPSSLSASVGDRVTITCRASQGIRNDLGWYQQKPGKAPKRLIYAASSLQSGVPSRFSGSGSGTEFTLTISSLQPEDFATYYCLQHNSYPLTFGGGTKLEIKSGGGGSEVQLVESGGGLVQPGGSLKLSCAASGFTFNKYAMNWVRQAPGKGLEWVARIRSKYNNYATYYADSVKDRFTISRDDSKNTAYLQMNNLKTEDTAVYYCVRHGNFGNSYISYWAYWGQGTLVTVSSGGGGSGGGGSGGGGSQTVVTQEPSLTVSPGGTVTLTCGSSTGAVTSGNYPNWVQQKPGQAPRGLIGGTKFLAPGTPARFSGSLLGGKAALTLSGVQPEDEAEYYCVLWYSNRWVFGGGTKLTVL

SEQ ID NO: 721 - protein, 7 aa, Artificial Sequence
  Synthetic
NARMGVS

SEQ ID NO: 722 - protein, 16 aa, Artificial Sequence
  Synthetic
HIFSNDEKSYSTSLKN

SEQ ID NO: 723 - protein, 14 aa, Artificial Sequence
  Synthetic
IVGYGSGWYGFFDY

SEQ ID NO: 724 - protein, 11 aa, Artificial Sequence
  Synthetic
RASQGIRNDLG

SEQ ID NO: 725 - protein, 7 aa, Artificial Sequence
  Synthetic
AASTLQS

SEQ ID NO: 726 - protein, 9 aa, Artificial Sequence
  Synthetic
LQHNSYPLT

SEQ ID NO: 727 - protein, 124 aa, Artificial Sequence
  Synthetic
QVTLKESGPTLVKPTETLTLTCTLSGFSLNNARMGVSWIRQPPGKCLEWLAHIFSNDEKSYSTSLKNRLTISKDSSKTQVVLTMTNVDPVDTATYYCARIVGYGSGWYGFFDYWGQGTLVTVSS

SEQ ID NO: 728 - protein, 107 aa, Artificial Sequence
  Synthetic
DIQMTQSPSSLSASVGDRVTITCRASQGIRNDLGWYQQKPGKAPKRLIYAASTLQSGVPSRFSGSGSGTEFTLTISSLQPEDFATYYCLQHNSYPLTFGCGTKVEIK

SEQ ID NO: 729 - protein, 246 aa, Artificial Sequence
  Synthetic
QVTLKESGPTLVKPTETLTLTCTLSGFSLNNARMGVSWIRQPPGKCLEWLAHIFSNDEKSYSTSLKNRLTISKDSSKTQVVLTMTNVDPVDTATYYCARIVGYGSGWYGFFDYWGQGTLVTVSSGGGGSGGGGSGGGGSDIQMTQSPSSLSASVGDRVTITCRASQGIRNDLGWYQQKPGKAPKRLIYAASTLQSGVPSRFSGSGSGTEFTLTISSLQPEDFATYYCLQHNSYPLTFGCGTKVEIK

SEQ ID NO: 730 - protein, 501 aa, Artificial Sequence
  Synthetic
QVTLKESGPTLVKPTETLTLTCTLSGFSLNNARMGVSWIRQPPGKCLEWLAHIFSNDEKSYSTSLKNRLTISKDSSKTQVVLTMTNVDPVDTATYYCARIVGYGSGWYGFFDYWGQGTLVTVSSGGGGSGGGGSGGGGSDIQMTQSPSSLSASVGDRVTITCRASQGIRNDLGWYQQKPGKAPKRLIYAASTLQSGVPSRFSGSGSGTEFTLTISSLQPEDFATYYCLQHNSYPLTFGCGTKVEIKSGGGGSEVQLVESGGGLVQPGGSLKLSCAASGFTFNKYAMNWVRQAPGKGLEWVARIRSKYNNYATYYADSVKDRFTISRDDSKNTAYLQMNNLKTEDTAVYYCVRHGNFGNSYISYWAYWGQGTLVTVSSGGGGSGGGGSGGGGSQTVVTQEPSLTVSPGGTVTLTCGSSTGAVTSGNYPNWVQQKPGQAPRGLIGGTKFLAPGTPARFSGSLLGGKAALTLSGVQPEDEAEYYCVLWYSNRWVFGGGTKLTVL

SEQ ID NO: 731 - protein, 7 aa, Artificial Sequence
  Synthetic
NARMGVS

SEQ ID NO: 732 - protein, 16 aa, Artificial Sequence
  Synthetic
NIFSNDEKSYSTSLKS

SEQ ID NO: 733 - protein, 14 aa, Artificial Sequence
  Synthetic
IVGYGSGWYGYFDY

SEQ ID NO: 734 - protein, 11 aa, Artificial Sequence
  Synthetic
RASQDIRNDLG

SEQ ID NO: 735 - protein, 7 aa, Artificial Sequence
  Synthetic
ATSIRQS

SEQ ID NO: 736 - protein, 9 aa, Artificial Sequence
  Synthetic
LQHNSFPLT

SEQ ID NO: 737 - protein, 124 aa, Artificial Sequence
  Synthetic
QVTLKESGPTLVKPTETLTLTCTVSGFSLSNARMGVSWIRQPPGKCLEWLANIFSNDEKSYSTSLKSRLTISKGTSKSQVVLTMTNVNPVDTGTYYCARIVGYGSGWYGYFDYWGQGTLVTVSS

SEQ ID NO: 738 - protein, 107 aa, Artificial Sequence
  Synthetic
DIQMTQSPSSLSASVGDRVTITCRASQDIRNDLGWYQQKPGKAPKRLIYATSIRQSGVPSRFTGSGSGTEFTLTISGLQPEDFATYFCLQHNSFPLTFGCGTKVEIK

SEQ ID NO: 739 - protein, 246 aa, Artificial Sequence
  Synthetic
QVTLKESGPTLVKPTETLTLTCTVSGFSLSNARMGVSWIRQPPGKCLEWLANIFSNDEKSYSTSLKSRLTISKGTSKSQVVLTMTNVNPVDTGTYYCARIVGYGSGWYGYFDYWGQGTLVTVSSGGGGSGGGGSGGGGSDIQMTQSPSSLSASVGDRVTITCRASQDIRNDLGWYQQKPGKAPKRLIYATSIRQSGVPSRFTGSGSGTEFTLTISGLQPEDFATYFCLQHNSFPLTFGCGTKVEIK

SEQ ID NO: 740 - protein, 501 aa, Artificial Sequence
  Synthetic
QVTLKESGPTLVKPTETLTLTCTVSGFSLSNARMGVSWIRQPPGKCLEWLANIFSNDEKSYSTSLKSRLTISKGTSKSQVVLTMTNVNPVDTGTYYCARIVGYGSGWYGYFDYWGQGTLVTVSSGGGGSGGGGSGGGGSDIQMTQSPSSLSASVGDRVTITCRASQDIRNDLGWYQQKPGKAPKRLIYATSIRQSGVPSRFTGSGSGTEFTLTISGLQPEDFATYFCLQHNSFPLTFGCGTKVEIKSGGGGSEVQLVESGGGLVQPGGSLKLSCAASGFTFNKYAMNWVRQAPGKGLEWVARIRSKYNNYATYYADSVKDRFTISRDDSKNTAYLQMNNLKTEDTAVYYCVRHGNFGNSYISYWAYWGQGTLVTVSSGGGGSGGGGSGGGGSQTVVTQEPSLTVSPGGTVTLTCGSSTGAVTSGNYPNWVQQKPGQAPRGLIGGTKFLAPGTPARFSGSLLGGKAALTLSGVQPEDEAEYYCVLWYSNRWVFGGGTKLTVL

SEQ ID NO: 741 - protein, 7 aa, Artificial Sequence
  Synthetic
NARMGVS

SEQ ID NO: 742 - protein, 16 aa, Artificial Sequence
  Synthetic
HIFSNDEKSFSTSLKN

SEQ ID NO: 743 - protein, 14 aa, Artificial Sequence
  Synthetic
MVGYGSGWYAYFDY

SEQ ID NO: 744 - protein, 11 aa, Artificial Sequence
  Synthetic
RASQSISSYLN

SEQ ID NO: 745 - protein, 7 aa, Artificial Sequence
  Synthetic
AASSLQS

SEQ ID NO: 746 - protein, 9 aa, Artificial Sequence
  Synthetic
LQHNSYPLT

SEQ ID NO: 747 - protein, 124 aa, Artificial Sequence
  Synthetic
QVTLKESGPVLVKPTQTLTLTCTFSGFSLSNARMGVSWIRQPPGKCLEWLAHIFSNDEKSFSTSLKNRLTISKDTSKSQVVLTMTNMDPVDTATYYCARMVGYGSGWYAYFDYWGQGTQVTVSS

SEQ ID NO: 748 - protein, 107 aa, Artificial Sequence
  Synthetic
DIQMTQSPSSLSASVGDRVTITCRASQSISSYLNWYQQKPGKAPKLLIYAASSLQSGVPSRFSGSGSGTDFTLTISSLQPEDFATYYCLQHNSYPLTFGCGTKVEIK

SEQ ID NO: 749 - protein, 246 aa, Artificial Sequence
  Synthetic
QVTLKESGPVLVKPTQTLTLTCTFSGFSLSNARMGVSWIRQPPGKCLEWLAHIFSNDEKSFSTSLKNRLTISKDTSKSQVVLTMTNMDPVDTATYYCARMVGYGSGWYAYFDYWGQGTQVTVSSGGGGSGGGGSGGGGSDIQMTQSPSSLSASVGDRVTITCRASQSISSYLNWYQQKPGKAPKLLIYAASSLQSGVPSRFSGSGSGTDFTLTISSLQPEDFATYYCLQHNSYPLTFGCGTKVEIK

SEQ ID NO: 750 - protein, 501 aa, Artificial Sequence
  Synthetic
QVTLKESGPVLVKPTQTLTLTCTFSGFSLSNARMGVSWIRQPPGKCLEWLAHIFSNDEKSFSTSLKNRLTISKDTSKSQVVLTMTNMDPVDTATYYCARMVGYGSGWYAYFDYWGQGTQVTVSSGGGGSGGGGSGGGGSDIQMTQSPSSLSASVGDRVTITCRASQSISSYLNWYQQKPGKAPKLLIYAASSLQSGVPSRFSGSGSGTDFTLTISSLQPEDFATYYCLQHNSYPLTFGCGTKVEIKSGGGGSEVQLVESGGGLVQPGGSLKLSCAASGFTFNKYAMNWVRQAPGKGLEWVARIRSKYNNYATYYADSVKDRFTISRDDSKNTAYLQMNNLKTEDTAVYYCVRHGNFGNSYISYWAYWGQGTLVTVSSGGGGSGGGGSGGGGSQTVVTQEPSLTVSPGGTVTLTCGSSTGAVTSGNYPNWVQQKPGQAPRGLIGGTKFLAPGTPARFSGSLLGGKAALTLSGVQPEDEAEYYCVLWYSNRWVFGGGTKLTVL

SEQ ID NO: 751 - protein, 7 aa, Artificial Sequence
  Synthetic
NARMAVS

SEQ ID NO: 752 - protein, 16 aa, Artificial Sequence
  Synthetic
HIFSNDEKSYSTSLKS

SEQ ID NO: 753 - protein, 14 aa, Artificial Sequence
  Synthetic
IVGYGTGWYGFFDY

SEQ ID NO: 754 - protein, 11 aa, Artificial Sequence
  Synthetic
RASQGIRNDLA

SEQ ID NO: 755 - protein, 7 aa, Artificial Sequence
  Synthetic
AASSLQS

SEQ ID NO: 756 - protein, 9 aa, Artificial Sequence
  Synthetic
LQHNSYPLT

SEQ ID NO: 757 - protein, 124 aa, Artificial Sequence
  Synthetic
QVTLKESGPALVKPTETLTLTCTLSGFSLNNARMAVSWIRQPPGKCLEWLAHIFSNDEKSYSTSLKSRLTISKDTSKSQVVLTMTNMDPEDTATYYCARIVGYGTGWYGFFDYWGQGILVTVSS

SEQ ID NO: 758 - protein, 107 aa, Artificial Sequence
  Synthetic
DIQMTQSPSSLSASVGDRVTITCRASQGIRNDLAWYQQKPGKAPKRLIYAASSLQSGVPSRFSGSGSGTEFTLTISSLQPEDFATYYCLQHNSYPLTFGCGTKVEIK

SEQ ID NO: 759 - protein, 246 aa, Artificial Sequence
  Synthetic
QVTLKESGPALVKPTETLTLTCTLSGFSLNNARMAVSWIRQPPGKCLEWLAHIFSNDEKSYSTSLKSRLTISKDTSKSQVVLTMTNMDPEDTATYYCARIVGYGTGWYGFFDYWGQGILVTVSSGGGGSGGGGSGGGGSDIQMTQSPSSLSASVGDRVTITCRASQGIRNDLAWYQQKPGKAPKRLIYAASSLQSGVPSRFSGSGSGTEFTLTISSLQPEDFATYYCLQHNSYPLTFGCGTKVEIK

SEQ ID NO: 760 - protein, 501 aa, Artificial Sequence
  Synthetic
QVTLKESGPALVKPTETLTLTCTLSGFSLNNARMAVSWIRQPPGKCLEWLAHIFSNDEKSYSTSLKSRLTISKDTSKSQVVLTMTNMDPEDTATYYCARIVGYGTGWYGFFDYWGQGILVTVSSGGGGSGGGGSGGGGSDIQMTQSPSSLSASVGDRVTITCRASQGIRNDLAWYQQKPGKAPKRLIYAASSLQSGVPSRFSGSGSGTEFTLTISSLQPEDFATYYCLQHNSYPLTFGCGTKVEIKSGGGGSEVQLVESGGGLVQPGGSLKLSCAASGFTFNKYAMNWVRQAPGKGLEWVARIRSKYNNYATYYADSVKDRFTISRDDSKNTAYLQMNNLKTEDTAVYYCVRHGNFGNSYISYWAYWGQGTLVTVSSGGGGSGGGGSGGGGSQTVVTQEPSLTVSPGGTVTLTCGSSTGAVTSGNYPNWVQQKPGQAPRGLIGGTKFLAPGTPARFSGSLLGGKAALTLSGVQPEDEAEYYCVLWYSNRWVFGGGTKLTVL

SEQ ID NO: 761 - protein, 7 aa, Artificial Sequence
  Synthetic
NARMGVS

SEQ ID NO: 762 - protein, 16 aa, Artificial Sequence
  Synthetic
HIFSNDEKSYSTSLKS

SEQ ID NO: 763 - protein, 14 aa, Artificial Sequence
  Synthetic
MPEYSSGWSGAFDI

SEQ ID NO: 764 - protein, 11 aa, Artificial Sequence
  Synthetic
RASQGIRNDLV

SEQ ID NO: 765 - protein, 7 aa, Artificial Sequence
  Synthetic
GTSTLQS

SEQ ID NO: 766 - protein, 9 aa, Artificial Sequence
  Synthetic
LQHNSYPLT

SEQ ID NO: 767 - protein, 124 aa, Artificial Sequence
  Synthetic
QVTLKESGPVLVKPTETLTLTCTVSGFSFRNARMGVSWIRQPPGKCLEWLAHIFSNDEKSYSTSLKSRLTISKDTSKSQVVLTLTNMDPVDTATYFCARMPEYSSGWSGAFDIWGQGTMVTVSS

SEQ ID NO: 768 - protein, 107 aa, Artificial Sequence
  Synthetic
DIQMTQSPSSLSASVGDRVTITCRASQGIRNDLVWYQQKPGKAPKRLIYGTSTLQSGVPSRFSGSGSGTEFTLTISSLQPEDFATYYCLQHNSYPLTFGCGTKVEIK

SEQ ID NO: 769 - protein, 246 aa, Artificial Sequence
  Synthetic
QVTLKESGPVLVKPTETLTLTCTVSGFSFRNARMGVSWIRQPPGKCLEWLAHIFSNDEKSYSTSLKSRLTISKDTSKSQVVLTLTNMDPVDTATYFCARMPEYSSGWSGAFDIWGQGTMVTVSSGGGGSGGGGSGGGGSDIQMTQSPSSLSASVGDRVTITCRASQGIRNDLVWYQQKPGKAPKRLIYGTSTLQSGVPSRFSGSGSGTEFTLTISSLQPEDFATYYCLQHNSYPLTFGCGTKVEIK

SEQ ID NO: 770 - protein, 501 aa, Artificial Sequence
  Synthetic
QVTLKESGPVLVKPTETLTLTCTVSGFSFRNARMGVSWIRQPPGKCLEWLAHIFSNDEKSYSTSLKSRLTISKDTSKSQVVLTLTNMDPVDTATYFCARMPEYSSGWSGAFDIWGQGTMVTVSSGGGGSGGGGSGGGGSDIQMTQSPSSLSASVGDRVTITCRASQGIRNDLVWYQQKPGKAPKRLIYGTSTLQSGVPSRFSGSGSGTEFTLTISSLQPEDFATYYCLQHNSYPLTFGCGTKVEIKSGGGGSEVQLVESGGGLVQPGGSLKLSCAASGFTFNKYAMNWVRQAPGKGLEWVARIRSKYNNYATYYADSVKDRFTISRDDSKNTAYLQMNNLKTEDTAVYYCVRHGNFGNSYISYWAYWGQGTLVTVSSGGGGSGGGGSGGGGSQTVVTQEPSLTVSPGGTVTLTCGSSTGAVTSGNYPNWVQQKPGQAPRGLIGGTKFLAPGTPARFSGSLLGGKAALTLSGVQPEDEAEYYCVLWYSNRWVFGGGTKLTVL

SEQ ID NO: 771 - protein, 7 aa, Artificial Sequence
  Synthetic
NARMGVS

SEQ ID NO: 772 - protein, 16 aa, Artificial Sequence
  Synthetic
HIFSNDEKSYSTSLKS

SEQ ID NO: 773 - protein, 14 aa, Artificial Sequence
  Synthetic
MPEYSSGWSGAFDI

SEQ ID NO: 774 - protein, 11 aa, Artificial Sequence
  Synthetic
RTSQGIRNDLV

SEQ ID NO: 775 - protein, 7 aa, Artificial Sequence
  Synthetic
AASTLQS

SEQ ID NO: 776 - protein, 9 aa, Artificial Sequence
  Synthetic
LQHYSYPLT

SEQ ID NO: 777 - protein, 124 aa, Artificial Sequence; identical to SEQ ID NO: 767
  Synthetic

SEQ ID NO: 778 - protein, 107 aa, Artificial Sequence
  Synthetic
DIQMTQSPSSLSASVGDRVTITCRTSQGIRNDLVWYQQKPGKAPKRLIYAASTLQSGVPSRFSGSGSGTEFTLTISSLQPEDFATYFCLQHYSYPLTFGCGTKVEIK

SEQ ID NO: 779 - protein, 246 aa, Artificial Sequence
  Synthetic
QVTLKESGPVLVKPTETLTLTCTVSGFSFRNARMGVSWIRQPPGKCLEWLAHIFSNDEKSYSTSLKSRLTISKDTSKSQVVLTLTNMDPVDTATYFCARMPEYSSGWSGAFDIWGQGTMVTVSSGGGGSGGGGSGGGGSDIQMTQSPSSLSASVGDRVTITCRTSQGIRNDLVWYQQKPGKAPKRLIYAASTLQSGVPSRFSGSGSGTEFTLTISSLQPEDFATYFCLQHYSYPLTFGCGTKVEIK

SEQ ID NO: 780 - protein, 501 aa, Artificial Sequence
  Synthetic
QVTLKESGPVLVKPTETLTLTCTVSGFSFRNARMGVSWIRQPPGKCLEWLAHIFSNDEKSYSTSLKSRLTISKDTSKSQVVLTLTNMDPVDTATYFCARMPEYSSGWSGAFDIWGQGTMVTVSSGGGGSGGGGSGGGGSDIQMTQSPSSLSASVGDRVTITCRTSQGIRNDLVWYQQKPGKAPKRLIYAASTLQSGVPSRFSGSGSGTEFTLTISSLQPEDFATYFCLQHYSYPLTFGCGTKVEIKSGGGGSEVQLVESGGGLVQPGGSLKLSCAASGFTFNKYAMNWVRQAPGKGLEWVARIRSKYNNYATYYADSVKDRFTISRDDSKNTAYLQMNNLKTEDTAVYYCVRHGNFGNSYISYWAYWGQGTLVTVSSGGGGSGGGGSGGGGSQTVVTQEPSLTVSPGGTVTLTCGSSTGAVTSGNYPNWVQQKPGQAPRGLIGGTKFLAPGTPARFSGSLLGGKAALTLSGVQPEDEAEYYCVLWYSNRWVFGGGTKLTVL

SEQ ID NO: 781 - protein, 7 aa, Artificial Sequence
  Synthetic
NARMGVS

SEQ ID NO: 782 - protein, 16 aa, Artificial Sequence
  Synthetic
HIFSNDEKSYRTSLKS

SEQ ID NO: 783 - protein, 14 aa, Artificial Sequence
  Synthetic
IVGYGSGWYAYFDY

SEQ ID NO: 784 - protein, 11 aa, Artificial Sequence
  Synthetic
RASQGIRNDLG

SEQ ID NO: 785 - protein, 7 aa, Artificial Sequence
  Synthetic
AASSLQS

SEQ ID NO: 786 - protein, 9 aa, Artificial Sequence
  Synthetic
LQHNSYPLT

SEQ ID NO: 787 - protein, 124 aa, Artificial Sequence
  Synthetic
QVTLKESGPALVKPTQTLTLTCTFSGFSLSNARMGVSWIRQPPGKCLEWLAHIFSNDEKSYRTSLKSRLTISKDTSKSQVVLTMTNMDPVDTATYYCARIVGYGSGWYAYFDYWGQGTLVTVSS

SEQ ID NO: 788 - protein, 107 aa, Artificial Sequence
  Synthetic
DIQMTQSPSSLSASVGDRVTITCRASQGIRNDLGWYQQKPGKAPKRLIYAASSLQSGVPSRFSGSGSGTEFTLTISSLQPEDFATYYCLQHNSYPLTFGCGTKVEIK

SEQ ID NO: 789 - protein, 246 aa, Artificial Sequence
  Synthetic
QVTLKESGPALVKPTQTLTLTCTFSGFSLSNARMGVSWIRQPPGKCLEWLAHIFSNDEKSYRTSLKSRLTISKDTSKSQVVLTMTNMDPVDTATYYCARIVGYGSGWYAYFDYWGQGTLVTVSSGGGGSGGGGSGGGGSDIQMTQSPSSLSASVGDRVTITCRASQGIRNDLGWYQQKPGKAPKRLIYAASSLQSGVPSRFSGSGSGTEFTLTISSLQPEDFATYYCLQHNSYPLTFGCGTKVEIK

SEQ ID NO: 790 - protein, 501 aa, Artificial Sequence
  Synthetic
QVTLKESGPALVKPTQTLTLTCTFSGFSLSNARMGVSWIRQPPGKCLEWLAHIFSNDEKSYRTSLKSRLTISKDTSKSQVVLTMTNMDPVDTATYYCARIVGYGSGWYAYFDYWGQGTLVTVSSGGGGSGGGGSGGGGSDIQMTQSPSSLSASVGDRVTITCRASQGIRNDLGWYQQKPGKAPKRLIYAASSLQSGVPSRFSGSGSGTEFTLTISSLQPEDFATYYCLQHNSYPLTFGCGTKVEIKSGGGGSEVQLVESGGGLVQPGGSLKLSCAASGFTFNKYAMNWVRQAPGKGLEWVARIRSKYNNYATYYADSVKDRFTISRDDSKNTAYLQMNNLKTEDTAVYYCVRHGNFGNSYISYWAYWGQGTLVTVSSGGGGSGGGGSGGGGSQTVVTQEPSLTVSPGGTVTLTCGSSTGAVTSGNYPNWVQQKPGQAPRGLIGGTKFLAPGTPARFSGSLLGGKAALTLSGVQPEDEAEYYCVLWYSNRWVFGGGTKLTVL

SEQ ID NO: 791 - protein, 7 aa, Artificial Sequence
  Synthetic
NARMGVS

SEQ ID NO: 792 - protein, 16 aa, Artificial Sequence
  Synthetic
LIYWNDDKRYSPSLKS

SEQ ID NO: 793 - protein, 14 aa, Artificial Sequence
  Synthetic
MVGYGSGWYAYFDY

SEQ ID NO: 794 - protein, 11 aa, Artificial Sequence
  Synthetic
RASQGIRNDLG

SEQ ID NO: 795 - protein, 7 aa, Artificial Sequence
  Synthetic
AASSLQS

SEQ ID NO: 796 - protein, 9 aa, Artificial Sequence
  Synthetic
LQHNSYPLT

SEQ ID NO: 797 - protein, 124 aa, Artificial Sequence
  Synthetic
QVTLKESGPVLVKPTQTLTLTCTFSGFSLSNARMGVSWIRQPPGKCLEWLALIYWNDDKRYSPSLKSRLTITKDTSKNQVVLTMTNMDPVDTATYYCARMVGYGSGWYAYFDYWGQGTLVTVSS

SEQ ID NO: 798 - protein, 107 aa, Artificial Sequence; identical to SEQ ID NO: 788
  Synthetic

SEQ ID NO: 799 - protein, 246 aa, Artificial Sequence
  Synthetic
QVTLKESGPVLVKPTQTLTLTCTFSGFSLSNARMGVSWIRQPPGKCLEWLALIYWNDDKRYSPSLKSRLTITKDTSKNQVVLTMTNMDPVDTATYYCARMVGYGSGWYAYFDYWGQGTLVTVSSGGGGSGGGGSGGGGSDIQMTQSPSSLSASVGDRVTITCRASQGIRNDLGWYQQKPGKAPKRLIYAASSLQSGVPSRFSGSGSGTEFTLTISSLQPEDFATYYCLQHNSYPLTFGCGTKVEIK

SEQ ID NO: 800 - protein, 501 aa, Artificial Sequence
  Synthetic
QVTLKESGPVLVKPTQTLTLTCTFSGFSLSNARMGVSWIRQPPGKCLEWLALIYWNDDKRYSPSLKSRLTITKDTSKNQVVLTMTNMDPVDTATYYCARMVGYGSGWYAYFDYWGQGTLVTVSSGGGGSGGGGSGGGGSDIQMTQSPSSLSASVGDRVTITCRASQGIRNDLGWYQQKPGKAPKRLIYAASSLQSGVPSRFSGSGSGTEFTLTISSLQPEDFATYYCLQHNSYPLTFGCGTKVEIKSGGGGSEVQLVESGGGLVQPGGSLKLSCAASGFTFNKYAMNWVRQAPGKGLEWVARIRSKYNNYATYYADSVKDRFTISRDDSKNTAYLQMNNLKTEDTAVYYCVRHGNFGNSYISYWAYWGQGTLVTVSSGGGGSGGGGSGGGGSQTVVTQEPSLTVSPGGTVTLTCGSSTGAVTSGNYPNWVQQKPGQAPRGLIGGTKFLAPGTPARFSGSLLGGKAALTLSGVQPEDEAEYYCVLWYSNRWVFGGGTKLTVL

SEQ ID NO: 801 - protein, 7 aa, Artificial Sequence
  Synthetic
NARMGVS

SEQ ID NO: 802 - protein, 16 aa, Artificial Sequence
  Synthetic
HIFSNDEKSYSTSLKS

SEQ ID NO: 803 - protein, 14 aa, Artificial Sequence
  Synthetic
IVGYGTGWYGFFDY

SEQ ID NO: 804 - protein, 11 aa, Artificial Sequence
  Synthetic
RTSQGIRNDLG

SEQ ID NO: 805 - protein, 7 aa, Artificial Sequence
  Synthetic
AASSLQS

SEQ ID NO: 806 - protein, 9 aa, Artificial Sequence
  Synthetic
LQHNSYPLT

SEQ ID NO: 807 - protein, 124 aa, Artificial Sequence
  Synthetic
QVTLKESGPALVKPTQTLTLTCTFSGFSLSNARMGVSWIRQPPGKCLEWLAHIFSNDEKSYSTSLKSRLTISKDTSKSQVVLTMTDMDPEDTATYYCARIVGYGTGWYGFFDYWGQGILVTVSS

SEQ ID NO: 808 - protein, 107 aa, Artificial Sequence
  Synthetic
DIQMTQSPSSLSASVGDRVTITCRTSQGIRNDLGWYQQKPGKAPKRLIYAASSLQSGVPSRFSGSGSGTEFTLTISSLQPEDFATYYCLQHNSYPLTFGCGTKVEIK

SEQ ID NO: 809 - protein, 246 aa, Artificial Sequence
  Synthetic
QVTLKESGPALVKPTQTLTLTCTFSGFSLSNARMGVSWIRQPPGKCLEWLAHIFSNDEKSYSTSLKSRLTISKDTSKSQVVLTMTDMDPEDTATYYCARIVGYGTGWYGFFDYWGQGILVTVSSGGGGSGGGGSGGGGSDIQMTQSPSSLSASVGDRVTITCRTSQGIRNDLGWYQQKPGKAPKRLIYAASSLQSGVPSRFSGSGSGTEFTLTISSLQPEDFATYYCLQHNSYPLTFGCGTKVEIK

SEQ ID NO: 810 - protein, 501 aa, Artificial Sequence
  Synthetic
QVTLKESGPALVKPTQTLTLTCTFSGFSLSNARMGVSWIRQPPGKCLEWLAHIFSNDEKSYSTSLKSRLTISKDTSKSQVVLTMTDMDPEDTATYYCARIVGYGTGWYGFFDYWGQGILVTVSSGGGGSGGGGSGGGGSDIQMTQSPSSLSASVGDRVTITCRTSQGIRNDLGWYQQKPGKAPKRLIYAASSLQSGVPSRFSGSGSGTEFTLTISSLQPEDFATYYCLQHNSYPLTFGCGTKVEIKSGGGGSEVQLVESGGGLVQPGGSLKLSCAASGFTFNKYAMNWVRQAPGKGLEWVARIRSKYNNYATYYADSVKDRFTISRDDSKNTAYLQMNNLKTEDTAVYYCVRHGNFGNSYISYWAYWGQGTLVTVSSGGGGSGGGGSGGGGSQTVVTQEPSLTVSPGGTVTLTCGSSTGAVTSGNYPNWVQQKPGQAPRGLIGGTKFLAPGTPARFSGSLLGGKAALTLSGVQPEDEAEYYCVLWYSNRWVFGGGTKLTVL

SEQ ID NO: 811 - protein, 7 aa, Artificial Sequence
  Synthetic
NARMGVS

SEQ ID NO: 812 - protein, 16 aa, Artificial Sequence
  Synthetic
HIFWNDEKSYSTSLKS

SEQ ID NO: 813 - protein, 15 aa, Artificial Sequence
  Synthetic
IPYYGSGSYNYGMDV

SEQ ID NO: 814 - protein, 11 aa, Artificial Sequence
  Synthetic
RASQGIRNDLG

SEQ ID NO: 815 - protein, 7 aa, Artificial Sequence
  Synthetic
AASSLQS

SEQ ID NO: 816 - protein, 9 aa, Artificial Sequence
  Synthetic
LQHNTYPLT

SEQ ID NO: 817 - protein, 125 aa, Artificial Sequence
  Synthetic
QVTLKESGPMLVKPTETLTLTCTFSGFSLRNARMGVSWIRQPPGKCLEWLAHIFWNDEKSYSTSLKSRLTISKDTSKSQVVLTMTNMDPVDTATYYCARIPYYGSGSYNYGMDVWGQGTTVTVSS

SEQ ID NO: 818 - protein, 107 aa, Artificial Sequence
  Synthetic
DIQMTQSPSSLSASVGDRVTITCRASQGIRNDLGWYQQKPGKAPKRLIYAASSLQSGVPSRFSGSGSGTEFTLTISSLQPEDFATYYCLQHNTYPLTFGCGTKVDIK

SEQ ID NO: 819 - protein, 247 aa, Artificial Sequence
  Synthetic
QVTLKESGPMLVKPTETLTLTCTFSGFSLRNARMGVSWIRQPPGKCLEWLAHIFWNDEKSYSTSLKSRLTISKDTSKSQVVLTMTNMDPVDTATYYCARIPYYGSGSYNYGMDVWGQGTTVTVSSGGGGSGGGGSGGGGSDIQMTQSPSSLSASVGDRVTITCRASQGIRNDLGWYQQKPGKAPKRLIYAASSLQSGVPSRFSGSGSGTEFTLTISSLQPEDFATYYCLQHNTYPLTFGCGTKVDIK

SEQ ID NO: 820 - protein, 502 aa, Artificial Sequence
  Synthetic
QVTLKESGPMLVKPTETLTLTCTFSGFSLRNARMGVSWIRQPPGKCLEWLAHIFWNDEKSYSTSLKSRLTISKDTSKSQVVLTMTNMDPVDTATYYCARIPYYGSGSYNYGMDVWGQGTTVTVSSGGGGSGGGGSGGGGSDIQMTQSPSSLSASVGDRVTITCRASQGIRNDLGWYQQKPGKAPKRLIYAASSLQSGVPSRFSGSGSGTEFTLTISSLQPEDFATYYCLQHNTYPLTFGCGTKVDIKSGGGGSEVQLVESGGGLVQPGGSLKLSCAASGFTFNKYAMNWVRQAPGKGLEWVARIRSKYNNYATYYADSVKDRFTISRDDSKNTAYLQMNNLKTEDTAVYYCVRHGNFGNSYISYWAYWGQGTLVTVSSGGGGSGGGGSGGGGSQTVVTQEPSLTVSPGGTVTLTCGSSTGAVTSGNYPNWVQQKPGQAPRGLIGGTKFLAPGTPARFSGSLLGGKAALTLSGVQPEDEAEYYCVLWYSNRWVFGGGTKLTVL

SEQ ID NO: 821 - protein, 7 aa, Artificial Sequence
  Synthetic
NARMGVS

SEQ ID NO: 822 - protein, 16 aa, Artificial Sequence
  Synthetic
HIFSNDEKSYSTSLKN

SEQ ID NO: 823 - protein, 14 aa, Artificial Sequence
  Synthetic
IVGYGTGWFGYFDY

SEQ ID NO: 824 - protein, 11 aa, Artificial Sequence
  Synthetic
RASQDIRTDLA

SEQ ID NO: 825 - protein, 7 aa, Artificial Sequence
  Synthetic
AASSLQS

SEQ ID NO: 826 - protein, 9 aa, Artificial Sequence
  Synthetic
LQHNRYPLT

SEQ ID NO: 827 - protein, 124 aa, Artificial Sequence
  Synthetic
QVTLKESGPTLVKPTETLTLTCTVSGFSLNNARMGVSWIRQPPGKCLEWLAHIFSNDEKSYSTSLKNRLTISKDSSKTQVVLTMTNVDPVDTATYYCARIVGYGTGWFGYFDYWGQGTQVTVSS

SEQ ID NO: 828 - protein, 107 aa, Artificial Sequence
  Synthetic
DIQMTQSPSSLSASVGDRVTITCRASQDIRTDLAWYQQKPGKAPKRLIYAASSLQSGVPSRFSGSGSGTEFTLTISSLQPEDFATYYCLQHNRYPLTFGCGTKVDIK

SEQ ID NO: 829 - protein, 246 aa, Artificial Sequence
  Synthetic
QVTLKESGPTLVKPTETLTLTCTVSGFSLNNARMGVSWIRQPPGKCLEWLAHIFSNDEKSYSTSLKNRLTISKDSSKTQVVLTMTNVDPVDTATYYCARIVGYGTGWFGYFDYWGQGTQVTVSSGGGGSGGGGSGGGGSDIQMTQSPSSLSASVGDRVTITCRASQDIRTDLAWYQQKPGKAPKRLIYAASSLQSGVPSRFSGSGSGTEFTLTISSLQPEDFATYYCLQHNRYPLTFGCGTKVDIK

SEQ ID NO: 830 - protein, 501 aa, Artificial Sequence
  Synthetic
QVTLKESGPTLVKPTETLTLTCTVSGFSLNNARMGVSWIRQPPGKCLEWLAHIFSNDEKSYSTSLKNRLTISKDSSKTQVVLTMTNVDPVDTATYYCARIVGYGTGWFGYFDYWGQGTQVTVSSGGGGSGGGGSGGGGSDIQMTQSPSSLSASVGDRVTITCRASQDIRTDLAWYQQKPGKAPKRLIYAASSLQSGVPSRFSGSGSGTEFTLTISSLQPEDFATYYCLQHNRYPLTFGCGTKVDIKSGGGGSEVQLVESGGGLVQPGGSLKLSCAASGFTFNKYAMNWVRQAPGKGLEWVARIRSKYNNYATYYADSVKDRFTISRDDSKNTAYLQMNNLKTEDTAVYYCVRHGNFGNSYISYWAYWGQGTLVTVSSGGGGSGGGGSGGGGSQTVVTQEPSLTVSPGGTVTLTCGSSTGAVTSGNYPNWVQQKPGQAPRGLIGGTKFLAPGTPARFSGSLLGGKAALTLSGVQPEDEAEYYCVLWYSNRWVFGGGTKLTVL

SEQ ID NO: 831 - protein, 7 aa, Artificial Sequence
  Synthetic
NARMGVS

SEQ ID NO: 832 - protein, 16 aa, Artificial Sequence
  Synthetic
HIFSNDEKSYSTSLKS

SEQ ID NO: 833 - protein, 17 aa, Artificial Sequence
  Synthetic
IPGYGGNFYYHYYGMDV

SEQ ID NO: 834 - protein, 11 aa, Artificial Sequence
  Synthetic
RASQGIRNDLA

SEQ ID NO: 835 - protein, 7 aa, Artificial Sequence
  Synthetic
AASTVQS

SEQ ID NO: 836 - protein, 9 aa, Artificial Sequence
  Synthetic
LQHNSFPWT

SEQ ID NO: 837 - protein, 127 aa, Artificial Sequence
  Synthetic
QVTLKESGPTLVKPTETLTLTCTVSGFSLSNARMGVSWIRQPPGKCLEWLAHIFSNDEKSYSTSLKSRLTISKDTSKSQVVLTMTNMDPVDTATYYCARIPGYGGNFYYHYYGMDVWGQGTTVTVSS

SEQ ID NO: 838 - protein, 107 aa, Artificial Sequence
  Synthetic
DIQMTQSPSSLSASVGDRVTITCRASQGIRNDLAWYQQKPGKAPKRLIYAASTVQSGVPSRFSGSGSGTEFALTISSLQPEDFATYYCLQHNSFPWTFGCGTKVDIK

SEQ ID NO: 839 - protein, 249 aa, Artificial Sequence
  Synthetic
QVTLKESGPTLVKPTETLTLTCTVSGFSLSNARMGVSWIRQPPGKCLEWLAHIFSNDEKSYSTSLKSRLTISKDTSKSQVVLTMTNMDPVDTATYYCARIPGYGGNFYYHYYGMDVWGQGTTVTVSSGGGGSGGGGSGGGGSDIQMTQSPSSLSASVGDRVTITCRASQGIRNDLAWYQQKPGKAPKRLIYAASTVQSGVPSRFSGSGSGTEFALTISSLQPEDFATYYCLQHNSFPWTFGCGTKVDIK

SEQ ID NO: 840 - protein, 504 aa, Artificial Sequence
  Synthetic
QVTLKESGPTLVKPTETLTLTCTVSGFSLSNARMGVSWIRQPPGKCLEWLAHIFSNDEKSYSTSLKSRLTISKDTSKSQVVLTMTNMDPVDTATYYCARIPGYGGNFYYHYYGMDVWGQGTTVTVSSGGGGSGGGGSGGGGSDIQMTQSPSSLSASVGDRVTITCRASQGIRNDLAWYQQKPGKAPKRLIYAASTVQSGVPSRFSGSGSGTEFALTISSLQPEDFATYYCLQHNSFPWTFGCGTKVDIKSGGGGSEVQLVESGGGLVQPGGSLKLSCAASGFTFNKYAMNWVRQAPGKGLEWVARIRSKYNNYATYYADSVKDRFTISRDDSKNTAYLQMNNLKTEDTAVYYCVRHGNFGNSYISYWAYWGQGTLVTVSSGGGGSGGGGSGGGGSQTVVTQEPSLTVSPGGTVTLTCGSSTGAVTSGNYPNWVQQKPGQAPRGLIGGTKFLAPGTPARFSGSLLGGKAALTLSGVQPEDEAEYYCVLWYSNRWVFGGGTKLTVL

SEQ ID NO: 841 - protein, 7 aa, Artificial Sequence
  Synthetic
NVRMGVS

SEQ ID NO: 842 - protein, 16 aa, Artificial Sequence
  Synthetic
HISSNDEKSYSTSLRS

SEQ ID NO: 843 - protein, 14 aa, Artificial Sequence
  Synthetic
MPGDSNTWRGFFDY

SEQ ID NO: 844 - protein, 11 aa, Artificial Sequence
  Synthetic
RTSQSVNNNLA

SEQ ID NO: 845 - protein, 7 aa, Artificial Sequence
  Synthetic
GASTRAT

SEQ ID NO: 846 - protein, 9 aa, Artificial Sequence
  Synthetic
LQHNSYPLT

SEQ ID NO: 847 - protein, 124 aa, Artificial Sequence
  Synthetic
QVTLKESGPTLVKPTETLTLTCTVSGFSLRNVRMGVSWIRQPPGKCLEWLAHISSNDEKSYSTSLRSRLTISTDTSKSQVVLTMTNMDPVDTATYYCARMPGDSNTWRGFFDYWGQGTLVTVSS

SEQ ID NO: 848 - protein, 107 aa, Artificial Sequence
  Synthetic
EIVMTQSPATLSVSPGERATLSCRTSQSVNNNLAWYQQKPGQAPRLLIYGASTRATGIPARFSGSGSGTEFTLTISSLQPEDFATYYCLQHNSYPLTFGCGTKVEIK

SEQ ID NO: 849 - protein, 246 aa, Artificial Sequence
  Synthetic
QVTLKESGPTLVKPTETLTLTCTVSGFSLRNVRMGVSWIRQPPGKCLEWLAHISSNDEKSYSTSLRSRLTISTDTSKSQVVLTMTNMDPVDTATYYCARMPGDSNTWRGFFDYWGQGTLVTVSSGGGGSGGGGSGGGGSEIVMTQSPATLSVSPGERATLSCRTSQSVNNNLAWYQQKPGQAPRLLIYGASTRATGIPARFSGSGSGTEFTLTISSLQPEDFATYYCLQHNSYPLTFGCGTKVEIK

SEQ ID NO: 850 - protein, 501 aa, Artificial Sequence
  Synthetic
QVTLKESGPTLVKPTETLTLTCTVSGFSLRNVRMGVSWIRQPPGKCLEWLAHISSNDEKSYSTSLRSRLTISTDTSKSQVVLTMTNMDPVDTATYYCARMPGDSNTWRGFFDYWGQGTLVTVSSGGGGSGGGGSGGGGSEIVMTQSPATLSVSPGERATLSCRTSQSVNNNLAWYQQKPGQAPRLLIYGASTRATGIPARFSGSGSGTEFTLTISSLQPEDFATYYCLQHNSYPLTFGCGTKVEIKSGGGGSEVQLVESGGGLVQPGGSLKLSCAASGFTFNKYAMNWVRQAPGKGLEWVARIRSKYNNYATYYADSVKDRFTISRDDSKNTAYLQMNNLKTEDTAVYYCVRHGNFGNSYISYWAYWGQGTLVTVSSGGGGSGGGGSGGGGSQTVVTQEPSLTVSPGGTVTLTCGSSTGAVTSGNYPNWVQQKPGQAPRGLIGGTKFLAPGTPARFSGSLLGGKAALTLSGVQPEDEAEYYCVLWYSNRWVFGGGTKLTVL

SEQ ID NO: 851 - protein, 7 aa, Artificial Sequence
  Synthetic
YARMGVS

SEQ ID NO: 852 - protein, 16 aa, Artificial Sequence
  Synthetic
HIFSNDEKSYSTSLKS

SEQ ID NO: 853 - protein, 14 aa, Artificial Sequence
  Synthetic
MPEYSSGWSGAFDI

SEQ ID NO: 854 - protein, 11 aa, Artificial Sequence
  Synthetic
RASQDIRNDLA

SEQ ID NO: 855 - protein, 7 aa, Artificial Sequence
  Synthetic
AASSLQS

SEQ ID NO: 856 - protein, 9 aa, Artificial Sequence
  Synthetic
LQHNSYPLT

SEQ ID NO: 857 - protein, 124 aa, Artificial Sequence
  Synthetic
QVTLKESGPTLVKPTETLTLTCTFSGFSLRYARMGVSWIRQPPGKCLEWLAHIFSNDEKSYSTSLKSRLTISKDTSKSQVVLTLTNMDPVDTATYFCARMPEYSSGWSGAFDIWGQGTMVTVSS

SEQ ID NO: 858 - protein, 107 aa, Artificial Sequence
  Synthetic
DIQMTQSPSSLSASVGDRVTITCRASQDIRNDLAWYQQKPGKAPKRLIYAASSLQSGVPSRFSGSGSGTEFTLTISSLQPEDFATYYCLQHNSYPLTFGCGTKLEIK

SEQ ID NO: 859 - protein, 246 aa, Artificial Sequence
  Synthetic
QVTLKESGPTLVKPTETLTLTCTFSGFSLRYARMGVSWIRQPPGKCLEWLAHIFSNDEKSYSTSLKSRLTISKDTSKSQVVLTLTNMDPVDTATYFCARMPEYSSGWSGAFDIWGQGTMVTVSSGGGGSGGGGSGGGGSDIQMTQSPSSLSASVGDRVTITCRASQDIRNDLAWYQQKPGKAPKRLIYAASSLQSGVPSRFSGSGSGTEFTLTISSLQPEDFATYYCLQHNSYPLTFGCGTKLEIK

SEQ ID NO: 860 - protein, 501 aa, Artificial Sequence
  Synthetic
QVTLKESGPTLVKPTETLTLTCTFSGFSLRYARMGVSWIRQPPGKCLEWLAHIFSNDEKSYSTSLKSRLTISKDTSKSQVVLTLTNMDPVDTATYFCARMPEYSSGWSGAFDIWGQGTMVTVSSGGGGSGGGGSGGGGSDIQMTQSPSSLSASVGDRVTITCRASQDIRNDLAWYQQKPGKAPKRLIYAASSLQSGVPSRFSGSGSGTEFTLTISSLQPEDFATYYCLQHNSYPLTFGCGTKLEIKSGGGGSEVQLVESGGGLVQPGGSLKLSCAASGFTFNKYAMNWVRQAPGKGLEWVARIRSKYNNYATYYADSVKDRFTISRDDSKNTAYLQMNNLKTEDTAVYYCVRHGNFGNSYISYWAYWGQGTLVTVSSGGGGSGGGGSGGGGSQTVVTQEPSLTVSPGGTVTLTCGSSTGAVTSGNYPNWVQQKPGQAPRGLIGGTKFLAPGTPARFSGSLLGGKAALTLSGVQPEDEAEYYCVLWYSNRWVFGGGTKLTVL

SEQ ID NO: 861 - protein, 5 aa, Artificial Sequence
  Synthetic
SYGMH

SEQ ID NO: 862 - protein, 17 aa, Artificial Sequence
  Synthetic
VISYDGSNEFYADSVKG

SEQ ID NO: 863 - protein, 20 aa, Artificial Sequence
  Synthetic
GGEITMVRGVIGYYYYGMDV

SEQ ID NO: 864 - protein, 11 aa, Artificial Sequence
  Synthetic
RTSQSISSYLN

SEQ ID NO: 865 - protein, 7 aa, Artificial Sequence
  Synthetic
AASSLQS

SEQ ID NO: 866 - protein, 9 aa, Artificial Sequence
  Synthetic
LQHNSYPLT

SEQ ID NO: 867 - protein, 129 aa, Artificial Sequence
  Synthetic
QVQLVESGGGVVQPGRSLRLSCAASGFTFSSYGMHWVRQAPGKCLEWVAVISYDGSNEFYADSVKGRFTISRDNSKNTLYLQMNSLRAEDTAVYYCARGGEITMVRGVIGYYYYGMDVWGQGTTVTVSS

SEQ ID NO: 868 - protein, 107 aa, Artificial Sequence
  Synthetic
DIQMTQSPSSLSASVGDRVTITCRTSQSISSYLNWYQQKPGKAPKLLIYAASSLQSGVPSRFSGSGSGTEFTLTISSLQPEDFATYYCLQHNSYPLTFGCGTKVDIK

SEQ ID NO: 869 - protein, 251 aa, Artificial Sequence
  Synthetic
QVQLVESGGGVVQPGRSLRLSCAASGFTFSSYGMHWVRQAPGKCLEWVAVISYDGSNEFYADSVKGRFTISRDNSKNTLYLQMNSLRAEDTAVYYCARGGEITMVRGVIGYYYYGMDVWGQGTTVTVSSGGGGSGGGGSGGGGSDIQMTQSPSSLSASVGDRVTITCRTSQSISSYLNWYQQKPGKAPKLLIYAASSLQSGVPSRFSGSGSGTEFTLTISSLQPEDFATYYCLQHNSYPLTFGCGTKVDIK

SEQ ID NO: 870 - protein, 506 aa, Artificial Sequence
  Synthetic
QVQLVESGGGVVQPGRSLRLSCAASGFTFSSYGMHWVRQAPGKCLEWVAVISYDGSNEFYADSVKGRFTISRDNSKNTLYLQMNSLRAEDTAVYYCARGGEITMVRGVIGYYYYGMDVWGQGTTVTVSSGGGGSGGGGSGGGGSDIQMTQSPSSLSASVGDRVTITCRTSQSISSYLNWYQQKPGKAPKLLIYAASSLQSGVPSRFSGSGSGTEFTLTISSLQPEDFATYYCLQHNSYPLTFGCGTKVDIKSGGGGSEVQLVESGGGLVQPGGSLKLSCAASGFTFNKYAMNWVRQAPGKGLEWVARIRSKYNNYATYYADSVKDRFTISRDDSKNTAYLQMNNLKTEDTAVYYCVRHGNFGNSYISYWAYWGQGTLVTVSSGGGGSGGGGSGGGGSQTVVTQEPSLTVSPGGTVTLTCGSSTGAVTSGNYPNWVQQKPGQAPRGLIGGTKFLAPGTPARFSGSLLGGKAALTLSGVQPEDEAEYYCVLWYSNRWVFGGGTKLTVL

SEQ ID NO: 871 - protein, 5 aa, Artificial Sequence
  Synthetic
SYGMH

SEQ ID NO: 872 - protein, 17 aa, Artificial Sequence
  Synthetic
VISYDGSNEFYADSVKG

SEQ ID NO: 873 - protein, 20 aa, Artificial Sequence
  Synthetic
GGEITMVRGVIGYYYYGMDV

SEQ ID NO: 874 - protein, 11 aa, Artificial Sequence
  Synthetic
RASQGVRNNLV

SEQ ID NO: 875 - protein, 7 aa, Artificial Sequence
  Synthetic
GASTRAT

SEQ ID NO: 876 - protein, 9 aa, Artificial Sequence
  Synthetic
LQHNSYPLT

SEQ ID NO: 877 - protein, 129 aa, Artificial Sequence; identical to SEQ ID NO: 867
  Synthetic

SEQ ID NO: 878 - protein, 107 aa, Artificial Sequence
  Synthetic
EIVMTQSPATLSVSPGERATLSCRASQGVRNNLVWYQQKPGQAPRLLIYGASTRATGIPARFSGSGSGTEFTLTISSLQSEDFATYYCLQHNSYPLTFGCGTKVEIK

SEQ ID NO: 879 - protein, 251 aa, Artificial Sequence
  Synthetic
QVQLVESGGGVVQPGRSLRLSCAASGFTFSSYGMHWVRQAPGKCLEWVAVISYDGSNEFYADSVKGRFTISRDNSKNTLYLQMNSLRAEDTAVYYCARGGEITMVRGVIGYYYYGMDVWGQGTTVTVSSGGGGSGGGGSGGGGSEIVMTQSPATLSVSPGERATLSCRASQGVRNNLVWYQQKPGQAPRLLIYGASTRATGIPARFSGSGSGTEFTLTISSLQSEDFATYYCLQHNSYPLTFGCGTKVEIK

SEQ ID NO: 880 - protein, 506 aa, Artificial Sequence
  Synthetic
QVQLVESGGGVVQPGRSLRLSCAASGFTFSSYGMHWVRQAPGKCLEWVAVISYDGSNEFYADSVKGRFTISRDNSKNTLYLQMNSLRAEDTAVYYCARGGEITMVRGVIGYYYYGMDVWGQGTTVTVSSGGGGSGGGGSGGGGSEIVMTQSPATLSVSPGERATLSCRASQGVRNNLVWYQQKPGQAPRLLIYGASTRATGIPARFSGSGSGTEFTLTISSLQSEDFATYYCLQHNSYPLTFGCGTKVEIKSGGGGSEVQLVESGGGLVQPGGSLKLSCAASGFTFNKYAMNWVRQAPGKGLEWVARIRSKYNNYATYYADSVKDRFTISRDDSKNTAYLQMNNLKTEDTAVYYCVRHGNFGNSYISYWAYWGQGTLVTVSSGGGGSGGGGSGGGGSQTVVTQEPSLTVSPGGTVTLTCGSSTGAVTSGNYPNWVQQKPGQAPRGLIGGTKFLAPGTPARFSGSLLGGKAALTLSGVQPEDEAEYYCVLWYSNRWVFGGGTKLTVL

SEQ ID NO: 881 - protein, 5 aa, Artificial Sequence
  Synthetic
SYGMH

SEQ ID NO: 882 - protein, 17 aa, Artificial Sequence
  Synthetic
VISYDGSNKYYADSVKG

SEQ ID NO: 883 - protein, 6 aa, Artificial Sequence
  Synthetic
SYGMDV

SEQ ID NO: 884 - protein, 11 aa, Artificial Sequence
  Synthetic
RASQGISSWLA

SEQ ID NO: 885 - protein, 7 aa, Artificial Sequence
  Synthetic
AASSLQS

SEQ ID NO: 886 - protein, 9 aa, Artificial Sequence
  Synthetic
QQANSFPWT

SEQ ID NO: 887 - protein, 115 aa, Artificial Sequence
  Synthetic
QVQLVESGGGVVQPGRSLRLSCAASGFTFSSYGMHWVRQAPGKCLEWVAVISYDGSNKYYADSVKGRFTISRDNSKNTLYLQMNSLRAEDTAVYYCARSYGMDVWGQGTTVTVSS

SEQ ID NO: 888 - protein, 107 aa, Artificial Sequence
  Synthetic
DIQMTQSPSSVSASVGDRVTITCRASQGISSWLAWYQQKPGKAPKLLIYAASSLQSGVPSRFSGSGSGTDFTLTISSLQPEDFATYYCQQANSFPWTFGCGTKLEIK

SEQ ID NO: 889 - protein, 237 aa, Artificial Sequence
  Synthetic
QVQLVESGGGVVQPGRSLRLSCAASGFTFSSYGMHWVRQAPGKCLEWVAVISYDGSNKYYADSVKGRFTISRDNSKNTLYLQMNSLRAEDTAVYYCARSYGMDVWGQGTTVTVSSGGGGSGGGGSGGGGSDIQMTQSPSSVSASVGDRVTITCRASQGISSWLAWYQQKPGKAPKLLIYAASSLQSGVPSRFSGSGSGTDFTLTISSLQPEDFATYYCQQANSFPWTFGCGTKLEIK

SEQ ID NO: 890 - protein, 492 aa, Artificial Sequence
  Synthetic
QVQLVESGGGVVQPGRSLRLSCAASGFTFSSYGMHWVRQAPGKCLEWVAVISYDGSNKYYADSVKGRFTISRDNSKNTLYLQMNSLRAEDTAVYYCARSYGMDVWGQGTTVTVSSGGGGSGGGGSGGGGSDIQMTQSPSSVSASVGDRVTITCRASQGISSWLAWYQQKPGKAPKLLIYAASSLQSGVPSRFSGSGSGTDFTLTISSLQPEDFATYYCQQANSFPWTFGCGTKLEIKSGGGGSEVQLVESGGGLVQPGGSLKLSCAASGFTFNKYAMNWVRQAPGKGLEWVARIRSKYNNYATYYADSVKDRFTISRDDSKNTAYLQMNNLKTEDTAVYYCVRHGNFGNSYISYWAYWGQGTLVTVSSGGGGSGGGGSGGGGSQTVVTQEPSLTVSPGGTVTLTCGSSTGAVTSGNYPNWVQQKPGQAPRGLIGGTKFLAPGTPARFSGSLLGGKAALTLSGVQPEDEAEYYCVLWYSNRWVFGGGTKLTVL

SEQ ID NO: 891 - protein, 7 aa, Artificial Sequence
  Synthetic
NVRMGVS

SEQ ID NO: 892 - protein, 16 aa, Artificial Sequence
  Synthetic
HIFSNDEKLYTTSLKS

SEQ ID NO: 893 - protein, 14 aa, Artificial Sequence
  Synthetic
IVGYGTGWYGYFDY

SEQ ID NO: 894 - protein, 11 aa, Artificial Sequence
  Synthetic
RASQDIRDDLG

SEQ ID NO: 895 - protein, 7 aa, Artificial Sequence
  Synthetic
ATSIRQS

SEQ ID NO: 896 - protein, 9 aa, Artificial Sequence
  Synthetic
LQHHSFPLT

SEQ ID NO: 897 - protein, 124 aa, Artificial Sequence
  Synthetic
QVTLKESGPVLVKPTETLTLTCTVSGFSLRNVRMGVSWIRQPPGKALEWLAHIFSNDEKLYTTSLKSRLTISKDTSKSQVVLTMTNMDPEDTATYYCARIVGYGTGWYGYFDYWGQGTQVTVSS

SEQ ID NO: 898 - protein, 107 aa, Artificial Sequence
  Synthetic
DIQMTQSPSSLSASIGDRVTITCRASQDIRDDLGWYQREPGKAPKRLIYATSIRQSGVPSRFSGSGSGTEFTLTISGLQPEDFATYFCLQHHSFPLTFGGGTKVDIK

SEQ ID NO: 899 - protein, 246 aa, Artificial Sequence
  Synthetic
QVTLKESGPVLVKPTETLTLTCTVSGFSLRNVRMGVSWIRQPPGKALEWLAHIFSNDEKLYTTSLKSRLTISKDTSKSQVVLTMTNMDPEDTATYYCARIVGYGTGWYGYFDYWGQGTQVTVSSGGGGSGGGGSGGGGSDIQMTQSPSSLSASIGDRVTITCRASQDIRDDLGWYQREPGKAPKRLIYATSIRQSGVPSRFSGSGSGTEFTLTISGLQPEDFATYFCLQHHSFPLTFGGGTKVDIK

SEQ ID NO: 900 - protein, 501 aa, Artificial Sequence
  Synthetic
QVTLKESGPVLVKPTETLTLTCTVSGFSLRNVRMGVSWIRQPPGKALEWLAHIFSNDEKLYTTSLKSRLTISKDTSKSQVVLTMTNMDPEDTATYYCARIVGYGTGWYGYFDYWGQGTQVTVSSGGGGSGGGGSGGGGSDIQMTQSPSSLSASIGDRVTITCRASQDIRDDLGWYQREPGKAPKRLIYATSIRQSGVPSRFSGSGSGTEFTLTISGLQPEDFATYFCLQHHSFPLTFGGGTKVDIKSGGGGSEVQLVESGGGLVQPGGSLKLSCAASGFTFNKYAMNWVRQAPGKGLEWVARIRSKYNNYATYYADSVKDRFTISRDDSKNTAYLQMNNLKTEDTAVYYCVRHGNFGNSYISYWAYWGQGTLVTVSSGGGGSGGGGSGGGGSQTVVTQEPSLTVSPGGTVTLTCGSSTGAVTSGNYPNWVQQKPGQAPRGLIGGTKFLAPGTPARFSGSLLGGKAALTLSGVQPEDEAEYYCVLWYSNRWVFGGGTKLTVL

SEQ ID NO: 901 - protein, 7 aa, Artificial Sequence
  Synthetic
YARMGVS

SEQ ID NO: 902 - protein, 16 aa, Artificial Sequence
  Synthetic
HISSNDEKSFSTALES

SEQ ID NO: 903 - protein, 14 aa, Artificial Sequence
  Synthetic
MPGDSNTWRGFFDY

SEQ ID NO: 904 - protein, 12 aa, Artificial Sequence
  Synthetic
RTSQTVTNSYIA

SEQ ID NO: 905 - protein, 7 aa, Artificial Sequence
  Synthetic
GTSTRAT

SEQ ID NO: 906 - protein, 9 aa, Artificial Sequence
  Synthetic
QKYGSSPLT

SEQ ID NO: 907 - protein, 124 aa, Artificial Sequence
  Synthetic
QVTLKESGPTLVKPTETLTLTCTFSGFSLRYARMGVSWIRQPPGKALEWLAHISSNDEKSFSTALESRLTISTDTSKSQMVLTMTNVDPVDTATYYCARMPGDSNTWRGFFDYWGQGTLVTVSS

SEQ ID NO: 908 - protein, 108 aa, Artificial Sequence
  Synthetic
EIVMTQSPGTLSLSPGERATLSCRTSQTVTNSYIAWYQQRPGQAPRLLIYGTSTRATGIPDRFSGSGSGTDFTLTISRLEPEDFAVYYCQKYGSSPLTFGGGTKLEIK

SEQ ID NO: 909 - protein, 247 aa, Artificial Sequence
  Synthetic
QVTLKESGPTLVKPTETLTLTCTFSGFSLRYARMGVSWIRQPPGKALEWLAHISSNDEKSFSTALESRLTISTDTSKSQMVLTMTNVDPVDTATYYCARMPGDSNTWRGFFDYWGQGTLVTVSSGGGGSGGGGSGGGGSEIVMTQSPGTLSLSPGERATLSCRTSQTVTNSYIAWYQQRPGQAPRLLIYGTSTRATGIPDRFSGSGSGTDFTLTISRLEPEDFAVYYCQKYGSSPLTFGGGTKLEIK

SEQ ID NO: 910 - protein, 502 aa, Artificial Sequence
  Synthetic
QVTLKESGPTLVKPTETLTLTCTFSGFSLRYARMGVSWIRQPPGKALEWLAHISSNDEKSFSTALESRLTISTDTSKSQMVLTMTNVDPVDTATYYCARMPGDSNTWRGFFDYWGQGTLVTVSSGGGGSGGGGSGGGGSEIVMTQSPGTLSLSPGERATLSCRTSQTVTNSYIAWYQQRPGQAPRLLIYGTSTRATGIPDRFSGSGSGTDFTLTISRLEPEDFAVYYCQKYGSSPLTFGGGTKLEIKSGGGGSEVQLVESGGGLVQPGGSLKLSCAASGFTFNKYAMNWVRQAPGKGLEWVARIRSKYNNYATYYADSVKDRFTISRDDSKNTAYLQMNNLKTEDTAVYYCVRHGNFGNSYISYWAYWGQGTLVTVSSGGGGSGGGGSGGGGSQTVVTQEPSLTVSPGGTVTLTCGSSTGAVTSGNYPNWVQQKPGQAPRGLIGGTKFLAPGTPARFSGSLLGGKAALTLSGVQPEDEAEYYCVLWYSNRWVFGGGTKLTVL

SEQ ID NO: 911 - protein, 7 aa, Artificial Sequence
  Synthetic
NVRMGVS

SEQ ID NO: 912 - protein, 16 aa, Artificial Sequence
  Synthetic
HISSNDEKSYSTSLRS

SEQ ID NO: 913 - protein, 14 aa, Artificial Sequence
  Synthetic
MPGDSNTWRGFFDY

SEQ ID NO: 914 - protein, 11 aa, Artificial Sequence
  Synthetic
RTSQSVNNNLA

SEQ ID NO: 915 - protein, 7 aa, Artificial Sequence
  Synthetic
GASTRAT

SEQ ID NO: 916 - protein, 9 aa, Artificial Sequence
  Synthetic
LQHNSYPLT

SEQ ID NO: 917 - protein, 124 aa, Artificial Sequence
  Synthetic
QVTLKESGPTLVKPTETLTLTCTVSGFSLRNVRMGVSWIRQPPGKALEWLAHISSNDEKSYSTSLRSRLTISTDTSKSQVVLTMTNMDPVDTATYYCARMPGDSNTWRGFFDYWGQGTLVTVSS

SEQ ID NO: 918 - protein, 107 aa, Artificial Sequence
  Synthetic
EIVMTQSPATLSVSPGERATLSCRTSQSVNNNLAWYQQKPGQAPRLLIYGASTRATGIPARFSGSGSGTEFTLTISSLQPEDFATYYCLQHNSYPLTFGGGTKVEIK

SEQ ID NO: 919 - protein, 246 aa, Artificial Sequence
  Synthetic
QVTLKESGPTLVKPTETLTLTCTVSGFSLRNVRMGVSWIRQPPGKALEWLAHISSNDEKSYSTSLRSRLTISTDTSKSQVVLTMTNMDPVDTATYYCARMPGDSNTWRGFFDYWGQGTLVTVSSGGGGSGGGGSGGGGSEIVMTQSPATLSVSPGERATLSCRTSQSVNNNLAWYQQKPGQAPRLLIYGASTRATGIPARFSGSGSGTEFTLTISSLQPEDFATYYCLQHNSYPLTFGGGTKVEIK

SEQ ID NO: 920 - protein, 501 aa, Artificial Sequence
  Synthetic
QVTLKESGPTLVKPTETLTLTCTVSGFSLRNVRMGVSWIRQPPGKALEWLAHISSNDEKSYSTSLRSRLTISTDTSKSQVVLTMTNMDPVDTATYYCARMPGDSNTWRGFFDYWGQGTLVTVSSGGGGSGGGGSGGGGSEIVMTQSPATLSVSPGERATLSCRTSQSVNNNLAWYQQKPGQAPRLLIYGASTRATGIPARFSGSGSGTEFTLTISSLQPEDFATYYCLQHNSYPLTFGGGTKVEIKSGGGGSEVQLVESGGGLVQPGGSLKLSCAASGFTFNKYAMNWVRQAPGKGLEWVARIRSKYNNYATYYADSVKDRFTISRDDSKNTAYLQMNNLKTEDTAVYYCVRHGNFGNSYISYWAYWGQGTLVTVSSGGGGSGGGGSGGGGSQTVVTQEPSLTVSPGGTVTLTCGSSTGAVTSGNYPNWVQQKPGQAPRGLIGGTKFLAPGTPARFSGSLLGGKAALTLSGVQPEDEAEYYCVLWYSNRWVFGGGTKLTVL

SEQ ID NO: 921 - protein, 7 aa, Artificial Sequence
  Synthetic
NVRMGVS

SEQ ID NO: 922 - protein, 16 aa, Artificial Sequence
  Synthetic
HIFSNDEKSYSTSLKS

SEQ ID NO: 923 - protein, 14 aa, Artificial Sequence
  Synthetic
MPEYSSGWSGAFDI

SEQ ID NO: 924 - protein, 11 aa, Artificial Sequence
  Synthetic
RASQDIRDDLG

SEQ ID NO: 925 - protein, 7 aa, Artificial Sequence
  Synthetic
GASTLQS

SEQ ID NO: 926 - protein, 9 aa, Artificial Sequence
  Synthetic
LQHNSYPLT

SEQ ID NO: 927 - protein, 124 aa, Artificial Sequence
  Synthetic
QVTLKESGPMLVKPTETLTLTCTVSGFSLRNVRMGVSWIRQPPGKALEWLAHIFSNDEKSYSTSLKSRLTISKDTSKSQVVLTLTNMDPVDTATYFCARMPEYSSGWSGAFDIWGQGTMVTVSS

SEQ ID NO: 928 - protein, 107 aa, Artificial Sequence
  Synthetic
DIQMTQSPSSLSASVGDRVTITCRASQDIRDDLGWYQQKPGNAPKRLIYGASTLQSGVPSRFSGSGSGTEFTLTISSLQPEDFATYYCLQHNSYPLTFGGGTRLEIK

SEQ ID NO: 929 - protein, 246 aa, Artificial Sequence
  Synthetic
QVTLKESGPMLVKPTETLTLTCTVSGFSLRNVRMGVSWIRQPPGKALEWLAHIFSNDEKSYSTSLKSRLTISKDTSKSQVVLTLTNMDPVDTATYFCARMPEYSSGWSGAFDIWGQGTMVTVSSGGGGSGGGGSGGGGSDIQMTQSPSSLSASVGDRVTITCRASQDIRDDLGWYQQKPGNAPKRLIYGASTLQSGVPSRFSGSGSGTEFTLTISSLQPEDFATYYCLQHNSYPLTFGGGTRLEIK

SEQ ID NO: 930 - protein, 501 aa, Artificial Sequence
  Synthetic
QVTLKESGPMLVKPTETLTLTCTVSGFSLRNVRMGVSWIRQPPGKALEWLAHIFSNDEKSYSTSLKSRLTISKDTSKSQVVLTLTNMDPVDTATYFCARMPEYSSGWSGAFDIWGQGTMVTVSSGGGGSGGGGSGGGGSDIQMTQSPSSLSASVGDRVTITCRASQDIRDDLGWYQQKPGNAPKRLIYGASTLQSGVPSRFSGSGSGTEFTLTISSLQPEDFATYYCLQHNSYPLTFGGGTRLEIKSGGGGSEVQLVESGGGLVQPGGSLKLSCAASGFTFNKYAMNWVRQAPGKGLEWVARIRSKYNNYATYYADSVKDRFTISRDDSKNTAYLQMNNLKTEDTAVYYCVRHGNFGNSYISYWAYWGQGTLVTVSSGGGGSGGGGSGGGGSQTVVTQEPSLTVSPGGTVTLTCGSSTGAVTSGNYPNWVQQKPGQAPRGLIGGTKFLAPGTPARFSGSLLGGKAALTLSGVQPEDEAEYYCVLWYSNRWVFGGGTKLTVL

SEQ ID NO: 931 - protein, 7 aa, Artificial Sequence
  Synthetic
NARMGVS

SEQ ID NO: 932 - protein, 16 aa, Artificial Sequence
  Synthetic
HIFSNDEKSYSTSLKS

SEQ ID NO: 933 - protein, 14 aa, Artificial Sequence
  Synthetic
MVGYGSGWYAYFDY

SEQ ID NO: 934 - protein, 16 aa, Artificial Sequence
  Synthetic
RSSQSLLHSNGYNYLY

SEQ ID NO: 935 - protein, 7 aa, Artificial Sequence
  Synthetic
EVSNRFS

SEQ ID NO: 936 - protein, 9 aa, Artificial Sequence
  Synthetic
MQALQTPLT

SEQ ID NO: 937 - protein, 124 aa, Artificial Sequence
  Synthetic
QVTLKESGPALVKPTQTLTLTCTFSGFSLSNARMGVSWIRQPPGKALEWLAHIFSNDEKSYSTSLKSRLTISKDTSKRQVVLTMTNMDPVDTATYYCARMVGYGSGWYAYFDYWGQGTLVTVSS

SEQ ID NO: 938 - protein, 112 aa, Artificial Sequence
  Synthetic
DIVMTQTPLSLSVTPGQPASISCRSSQSLLHSNGYNYLYWYLQKPGQPPQLLIYEVSNRFSGVPDRFSGSGSGTDFTLKISRVEAEDVGVYYCMQALQTPLTFGGGTKVEIK

SEQ ID NO: 939 - protein, 251 aa, Artificial Sequence
  Synthetic
QVTLKESGPALVKPTQTLTLTCTFSGFSLSNARMGVSWIRQPPGKALEWLAHIFSNDEKSYSTSLKSRLTISKDTSKRQVVLTMTNMDPVDTATYYCARMVGYGSGWYAYFDYWGQGTLVTVSSGGGGSGGGGSGGGGSDIVMTQTPLSLSVTPGQPASISCRSSQSLLHSNGYNYLYWYLQKPGQPPQLLIYEVSNRFSGVPDRFSGSGSGTDFTLKISRVEAEDVGVYYCMQALQTPLTFGGGTKVEIK

SEQ ID NO: 940 - protein, 506 aa, Artificial Sequence
  Synthetic
QVTLKESGPALVKPTQTLTLTCTFSGFSLSNARMGVSWIRQPPGKALEWLAHIFSNDEKSYSTSLKSRLTISKDTSKRQVVLTMTNMDPVDTATYYCARMVGYGSGWYAYFDYWGQGTLVTVSSGGGGSGGGGSGGGGSDIVMTQTPLSLSVTPGQPASISCRSSQSLLHSNGYNYLYWYLQKPGQPPQLLIYEVSNRFSGVPDRFSGSGSGTDFTLKISRVEAEDVGVYYCMQALQTPLTFGGGTKVEIKSGGGGSEVQLVESGGGLVQPGGSLKLSCAASGFTFNKYAMNWVRQAPGKGLEWVARIRSKYNNYATYYADSVKDRFTISRDDSKNTAYLQMNNLKTEDTAVYYCVRHGNFGNSYISYWAYWGQGTLVTVSSGGGGSGGGGSGGGGSQTVVTQEPSLTVSPGGTVTLTCGSSTGAVTSGNYPNWVQQKPGQAPRGLIGGTKFLAPGTPARFSGSLLGGKAALTLSGVQPEDEAEYYCVLWYSNRWVFGGGTKLTVL

SEQ ID NO: 941 - protein, 5 aa, Artificial Sequence
  Synthetic
SYGMH

SEQ ID NO: 942 - protein, 17 aa, Artificial Sequence
  Synthetic
VISYDGSNEFYADSVKG

SEQ ID NO: 943 - protein, 20 aa, Artificial Sequence
  Synthetic
GGEITMVRGVIGYYYYGMDV

SEQ ID NO: 944 - protein, 11 aa, Artificial Sequence
  Synthetic
RASQSISSYLN

SEQ ID NO: 945 - protein, 7 aa, Artificial Sequence
  Synthetic
AASSLQS

SEQ ID NO: 946 - protein, 9 aa, Artificial Sequence
  Synthetic
LQHNSYPLT

SEQ ID NO: 947 - protein, 129 aa, Artificial Sequence
  Synthetic
QVQLVESGGGVVQPGRSLRLSCAASGFTFSSYGMHWVRQAPGKGLEWVAVISYDGSNEFYADSVKGRFTISRDNSKNTLYLQMNSLRAEDTAVYYCARGGEITMVRGVIGYYYYGMDVWGQGTTVTVSS

SEQ ID NO: 948 - protein, 107 aa, Artificial Sequence
  Synthetic
DIQMTQSPSSLSASVGDRVTITCRASQSISSYLNWYQQKPGKAPKLLIYAASSLQSGVPSRFSGSGSGTEFTLTISSLQPEDFATYYCLQHNSYPLTFGGGTKVEIK

SEQ ID NO: 949 - protein, 251 aa, Artificial Sequence
  Synthetic
QVQLVESGGGVVQPGRSLRLSCAASGFTFSSYGMHWVRQAPGKGLEWVAVISYDGSNEFYADSVKGRFTISRDNSKNTLYLQMNSLRAEDTAVYYCARGGEITMVRGVIGYYYYGMDVWGQGTTVTVSSGGGGSGGGGSGGGGSDIQMTQSPSSLSASVGDRVTITCRASQSISSYLNWYQQKPGKAPKLLIYAASSLQSGVPSRFSGSGSGTEFTLTISSLQPEDFATYYCLQHNSYPLTFGGGTKVEIK

SEQ ID NO: 950 - protein, 506 aa, Artificial Sequence
  Synthetic
QVQLVESGGGVVQPGRSLRLSCAASGFTFSSYGMHWVRQAPGKGLEWVAVISYDGSNEFYADSVKGRFTISRDNSKNTLYLQMNSLRAEDTAVYYCARGGEITMVRGVIGYYYYGMDVWGQGTTVTVSSGGGGSGGGGSGGGGSDIQMTQSPSSLSASVGDRVTITCRASQSISSYLNWYQQKPGKAPKLLIYAASSLQSGVPSRFSGSGSGTEFTLTISSLQPEDFATYYCLQHNSYPLTFGGGTKVEIKSGGGGSEVQLVESGGGLVQPGGSLKLSCAASGFTFNKYAMNWVRQAPGKGLEWVARIRSKYNNYATYYADSVKDRFTISRDDSKNTAYLQMNNLKTEDTAVYYCVRHGNFGNSYISYWAYWGQGTLVTVSSGGGGSGGGGSGGGGSQTVVTQEPSLTVSPGGTVTLTCGSSTGAVTSGNYPNWVQQKPGQAPRGLIGGTKFLAPGTPARFSGSLLGGKAALTLSGVQPEDEAEYYCVLWYSNRWVFGGGTKLTVL

SEQ ID NO: 951 - protein, 5 aa, Artificial Sequence
  Synthetic
SYGMH

SEQ ID NO: 952 - protein, 17 aa, Artificial Sequence
  Synthetic
VISYDGSNEFYADSVKG

SEQ ID NO: 953 - protein, 20 aa, Artificial Sequence
  Synthetic
GGEITMVRGVIGYYYYGMDV

SEQ ID NO: 954 - protein, 11 aa, Artificial Sequence
  Synthetic
RASQGVRNNLV

SEQ ID NO: 955 - protein, 7 aa, Artificial Sequence
  Synthetic
GASTRAT

SEQ ID NO: 956 - protein, 9 aa, Artificial Sequence
  Synthetic
LQHNSYPLT

SEQ ID NO: 957 - protein, 129 aa, Artificial Sequence; identical to SEQ ID NO: 947
  Synthetic

SEQ ID NO: 958 - protein, 107 aa, Artificial Sequence
  Synthetic
EIVMTQSPATLSVSPGERATLSCRASQGVRNNLVWYQQKPGQAPRLLIYGASTRATGIPARFSGSGSGTEFTLTISSLQSEDFATYYCLQHNSYPLTFGGGTKVEIK

SEQ ID NO: 959 - protein, 251 aa, Artificial Sequence
  Synthetic
QVQLVESGGGVVQPGRSLRLSCAASGFTFSSYGMHWVRQAPGKGLEWVAVISYDGSNEFYADSVKGRFTISRDNSKNTLYLQMNSLRAEDTAVYYCARGGEITMVRGVIGYYYYGMDVWGQGTTVTVSSGGGGSGGGGSGGGGSEIVMTQSPATLSVSPGERATLSCRASQGVRNNLVWYQQKPGQAPRLLIYGASTRATGIPARFSGSGSGTEFTLTISSLQSEDFATYYCLQHNSYPLTFGGGTKVEIK

SEQ ID NO: 960 - protein, 506 aa, Artificial Sequence
  Synthetic
QVQLVESGGGVVQPGRSLRLSCAASGFTFSSYGMHWVRQAPGKGLEWVAVISYDGSNEFYADSVKGRFTISRDNSKNTLYLQMNSLRAEDTAVYYCARGGEITMVRGVIGYYYYGMDVWGQGTTVTVSSGGGGSGGGGSGGGGSEIVMTQSPATLSVSPGERATLSCRASQGVRNNLVWYQQKPGQAPRLLIYGASTRATGIPARFSGSGSGTEFTLTISSLQSEDFATYYCLQHNSYPLTFGGGTKVEIKSGGGGSEVQLVESGGGLVQPGGSLKLSCAASGFTFNKYAMNWVRQAPGKGLEWVARIRSKYNNYATYYADSVKDRFTISRDDSKNTAYLQMNNLKTEDTAVYYCVRHGNFGNSYISYWAYWGQGTLVTVSSGGGGSGGGGSGGGGSQTVVTQEPSLTVSPGGTVTLTCGSSTGAVTSGNYPNWVQQKPGQAPRGLIGGTKFLAPGTPARFSGSLLGGKAALTLSGVQPEDEAEYYCVLWYSNRWVFGGGTKLTVL

SEQ ID NO: 961 - protein, 5 aa, Artificial Sequence
  Synthetic
SYGMH

SEQ ID NO: 962 - protein, 17 aa, Artificial Sequence
  Synthetic
VISYDGSNEFYADSVKG

SEQ ID NO: 963 - protein, 20 aa, Artificial Sequence
  Synthetic
GGEITMVRGVIGYYYYGMDV

SEQ ID NO: 964 - protein, 11 aa, Artificial Sequence
  Synthetic
RTSQSISSYLN

SEQ ID NO: 965 - protein, 7 aa, Artificial Sequence
  Synthetic
AASSLQS

SEQ ID NO: 966 - protein, 9 aa, Artificial Sequence
  Synthetic
LQHNSYPLT

SEQ ID NO: 967 - protein, 129 aa, Artificial Sequence; identical to SEQ ID NO: 947
  Synthetic

SEQ ID NO: 968 - protein, 107 aa, Artificial Sequence
  Synthetic
DIQMTQSPSSLSASVGDRVTITCRTSQSISSYLNWYQQKPGKAPKLLIYAASSLQSGVPSRFSGSGSGTEFTLTISSLQPEDFATYYCLQHNSYPLTFGGGTKVDIK

SEQ ID NO: 969 - protein, 251 aa, Artificial Sequence
  Synthetic
QVQLVESGGGVVQPGRSLRLSCAASGFTFSSYGMHWVRQAPGKGLEWVAVISYDGSNEFYADSVKGRFTISRDNSKNTLYLQMNSLRAEDTAVYYCARGGEITMVRGVIGYYYYGMDVWGQGTTVTVSSGGGGSGGGGSGGGGSDIQMTQSPSSLSASVGDRVTITCRTSQSISSYLNWYQQKPGKAPKLLIYAASSLQSGVPSRFSGSGSGTEFTLTISSLQPEDFATYYCLQHNSYPLTFGGGTKVDIK

SEQ ID NO: 970 - protein, 506 aa, Artificial Sequence
  Synthetic
QVQLVESGGGVVQPGRSLRLSCAASGFTFSSYGMHWVRQAPGKGLEWVAVISYDGSNEFYADSVKGRFTISRDNSKNTLYLQMNSLRAEDTAVYYCARGGEITMVRGVIGYYYYGMDVWGQGTTVTVSSGGGGSGGGGSGGGGSDIQMTQSPSSLSASVGDRVTITCRTSQSISSYLNWYQQKPGKAPKLLIYAASSLQSGVPSRFSGSGSGTEFTLTISSLQPEDFATYYCLQHNSYPLTFGGGTKVDIKSGGGGSEVQLVESGGGLVQPGGSLKLSCAASGFTFNKYAMNWVRQAPGKGLEWVARIRSKYNNYATYYADSVKDRFTISRDDSKNTAYLQMNNLKTEDTAVYYCVRHGNFGNSYISYWAYWGQGTLVTVSSGGGGSGGGGSGGGGSQTVVTQEPSLTVSPGGTVTLTCGSSTGAVTSGNYPNWVQQKPGQAPRGLIGGTKFLAPGTPARFSGSLLGGKAALTLSGVQPEDEAEYYCVLWYSNRWVFGGGTKLTVL

SEQ ID NO: 971 - protein, 5 aa, Artificial Sequence
  Synthetic
SYGMH

SEQ ID NO: 972 - protein, 17 aa, Artificial Sequence
  Synthetic
VISYDGSNEFYADSVKG

SEQ ID NO: 973 - protein, 20 aa, Artificial Sequence
  Synthetic
GGEITMVRGVIGYYYYGMDV

SEQ ID NO: 974 - protein, 11 aa, Artificial Sequence
  Synthetic
RASQSISSYLN

SEQ ID NO: 975 - protein, 7 aa, Artificial Sequence
  Synthetic
AASSLQS

SEQ ID NO: 976 - protein, 9 aa, Artificial Sequence
  Synthetic
LQHNSYPLT

SEQ ID NO: 977 - protein, 129 aa, Artificial Sequence; identical to SEQ ID NO: 947
  Synthetic

SEQ ID NO: 978 - protein, 107 aa, Artificial Sequence
  Synthetic
DIQMTQSPSSLSASVGNRVTITCRASQSISSYLNWYQQKPGKAPKLLIYAASSLQSGVPSRFSGSGSGTEFTLTISSLQPEDFATYYCLQHNSYPLTFGGGTKVDIK

SEQ ID NO: 979 - protein, 251 aa, Artificial Sequence
  Synthetic
QVQLVESGGGVVQPGRSLRLSCAASGFTFSSYGMHWVRQAPGKGLEWVAVISYDGSNEFYADSVKGRFTISRDNSKNTLYLQMNSLRAEDTAVYYCARGGEITMVRGVIGYYYYGMDVWGQGTTVTVSSGGGGSGGGGSGGGGSDIQMTQSPSSLSASVGNRVTITCRASQSISSYLNWYQQKPGKAPKLLIYAASSLQSGVPSRFSGSGSGTEFTLTISSLQPEDFATYYCLQHNSYPLTFGGGTKVDIK

SEQ ID NO: 980 - protein, 506 aa, Artificial Sequence
  Synthetic
QVQLVESGGGVVQPGRSLRLSCAASGFTFSSYGMHWVRQAPGKGLEWVAVISYDGSNEFYADSVKGRFTISRDNSKNTLYLQMNSLRAEDTAVYYCARGGEITMVRGVIGYYYYGMDVWGQGTTVTVSSGGGGSGGGGSGGGGSDIQMTQSPSSLSASVGNRVTITCRASQSISSYLNWYQQKPGKAPKLLIYAASSLQSGVPSRFSGSGSGTEFTLTISSLQPEDFATYYCLQHNSYPLTFGGGTKVDIKSGGGGSEVQLVESGGGLVQPGGSLKLSCAASGFTFNKYAMNWVRQAPGKGLEWVARIRSKYNNYATYYADSVKDRFTISRDDSKNTAYLQMNNLKTEDTAVYYCVRHGNFGNSYISYWAYWGQGTLVTVSSGGGGSGGGGSGGGGSQTVVTQEPSLTVSPGGTVTLTCGSSTGAVTSGNYPNWVQQKPGQAPRGLIGGTKFLAPGTPARFSGSLLGGKAALTLSGVQPEDEAEYYCVLWYSNRWVFGGGTKLTVL

SEQ ID NO: 981 - protein, 5 aa, Artificial Sequence
  Synthetic
SYGMH

SEQ ID NO: 982 - protein, 17 aa, Artificial Sequence
  Synthetic
VISYDGSNKYYADSVKG

SEQ ID NO: 983 - protein, 6 aa, Artificial Sequence
  Synthetic
SYGMDV

SEQ ID NO: 984 - protein, 11 aa, Artificial Sequence
  Synthetic
RASQGISSWLA

SEQ ID NO: 985 - protein, 7 aa, Artificial Sequence
  Synthetic
AASSLQS

SEQ ID NO: 986 - protein, 9 aa, Artificial Sequence
  Synthetic
QQANSFPWT

SEQ ID NO: 987 - protein, 115 aa, Artificial Sequence
  Synthetic
QVQLVESGGGVVQPGRSLRLSCAASGFTFSSYGMHWVRQAPGKGLEWVAVISYDGSNKYYADSVKGRFTISRDNSKNTLYLQMNSLRAEDTAVYYCARSYGMDVWGQGTTVTVSS

SEQ ID NO: 988 - protein, 107 aa, Artificial Sequence
  Synthetic
DIQMTQSPSSVSASVGDRVTITCRASQGISSWLAWYQQKPGKAPKLLIYAASSLQSGVPSRFSGSGSGTDFTLTISSLQPEDFATYYCQQANSFPWTFGQGTKLEIK

SEQ ID NO: 989 - protein, 237 aa, Artificial Sequence
  Synthetic
QVQLVESGGGVVQPGRSLRLSCAASGFTFSSYGMHWVRQAPGKGLEWVAVISYDGSNKYYADSVKGRFTISRDNSKNTLYLQMNSLRAEDTAVYYCARSYGMDVWGQGTTVTVSSGGGGSGGGGSGGGGSDIQMTQSPSSVSASVGDRVTITCRASQGISSWLAWYQQKPGKAPKLLIYAASSLQSGVPSRFSGSGSGTDFTLTISSLQPEDFATYYCQQANSFPWTFGQGTKLEIK

SEQ ID NO: 990 - protein, 492 aa, Artificial Sequence
  Synthetic
QVQLVESGGGVVQPGRSLRLSCAASGFTFSSYGMHWVRQAPGKGLEWVAVISYDGSNKYYADSVKGRFTISRDNSKNTLYLQMNSLRAEDTAVYYCARSYGMDVWGQGTTVTVSSGGGGSGGGGSGGGGSDIQMTQSPSSVSASVGDRVTITCRASQGISSWLAWYQQKPGKAPKLLIYAASSLQSGVPSRFSGSGSGTDFTLTISSLQPEDFATYYCQQANSFPWTFGQGTKLEIKSGGGGSEVQLVESGGGLVQPGGSLKLSCAASGFTFNKYAMNWVRQAPGKGLEWVARIRSKYNNYATYYADSVKDRFTISRDDSKNTAYLQMNNLKTEDTAVYYCVRHGNFGNSYISYWAYWGQGTLVTVSSGGGGSGGGGSGGGGSQTVVTQEPSLTVSPGGTVTLTCGSSTGAVTSGNYPNWVQQKPGQAPRGLIGGTKFLAPGTPARFSGSLLGGKAALTLSGVQPEDEAEYYCVLWYSNRWVFGGGTKLTVL

SEQ ID NO: 991 - protein, 52 aa, Artificial Sequence
  Synthetic
NQDLPVIKCVLINHKNNDSSVGKSSSYPMVSESPEDLGCALRPQSSGTVYEA

SEQ ID NO: 992 - protein, 993 aa, Homo Sapiens
MPALARDGGQLPLLVVFSAMIFGTITNQDLPVIKCVLINHKNNDSSVGKSSSYPMVSESPEDLGCALRPQSSGTVYEAAAVEVDVSASITLQVLVDAPGNISCLWVFKHSSLNCQPHFDLQNRGVVSMVILKMTETQAGEYLLFIQSEATNYTILFTVSIRNTLLYTLRRPYFRKMENQDALVCISESVPEPIVEWVLCDSQGESCKEESPAVVKKEEKVLHELFGTDIRCCARNELGRECTRLFTIDLNQTPQTTLPQLFLKVGEPLWIRCKAVHVNHGFGLTWELENKALEEGNYFEMSTYSTNRTMIRILFAFVSSVARNDTGYYTCSSSKHPSQSALVTIVEKGFINATNSSEDYEIDQYEEFCFSVRFKAYPQIRCTWTFSRKSFPCEQKGLDNGYSISKFCNHKHQPGEYIFHAENDDAQFTKMFTLNIRRKPQVLAEASASQASCFSDGYPLPSWTWKKCSDKSPNCTEEITEGVWNRKANRKVFGQWVSSSTLNMSEAIKGFLVKCCAYNSLGTSCETILLNSPGPFPFIQDNISFYATIGVCLLFIVVLTLLICHKYKKQFRYESQLQMVQVTGSSDNEYFYVDFREYEYDLKWEFPRENLEFGKVLGSGAFGKVMNATAYGISKTGVSIQVAVKMLKEKADSSEREALMSELKMMTQLGSHENIVNLLGACTLSGPIYLIFEYCCYGDLLNYLRSKREKFHRTWTEIFKEHNFSFYPTFQSHPNSSMPGSREVQIHPDSDQISGLHGNSFHSEDEIEYENQKRLEEEEDLNVLTFEDLLCFAYQVAKGMEFLEFKSCVHRDLAARNVLVTHGKVVKICDFGLARDIMSDSNYVVRGNARLPVKWMAPESLFEGIYTIKSDVWSYGILLWEIFSLGVNPYPGIPVDANFYKLIQNGFKMDQPFYATEEIYIIMQSCWAFDSRKRPSFPNLTSFLGCQLADAEEAMYQNVDGRVSECPHTYQNRRPFSREMDLGLLSPQAQVEDS

SEQ ID NO: 993 - protein, 750 aa, Homo Sapeins
MWNLLHETDSAVATARRPRWLCAGALVLAGGFFLLGFLFGWFIKSSNEATNITPKHNMKAFLDELKAENIKKFLYNFTQIPHLAGTEQNFQLAKQIQSQWKEFGLDSVELAHYDVLLSYPNKTHPNYISIINEDGNEIFNTSLFEPPPPGYENVSDIVPPFSAFSPQGMPEGDLVYVNYARTEDFFKLERDMKINCSGKIVIARYGKVFRGNKVKNAQLAGAKGVILYSDPADYFAPGVKSYPDGWNLPGGGVQRGNILNLNGAGDPLTPGYPANEYAYRRGIAEAVGLPSIPVHPIGYYDAQKLLEKMGGSAPPDSSWRGSLKVPYNVGPGFTGNFSTQKVKMHIHSTNEVTRIYNVIGTLRGAVEPDRYVILGGHRDSWVFGGIDPQSGAAVVHEIVRSFGTLKKEGWRPRRTILFASWDAEEFGLLGSTEWAEENSRLLQERGVAYINADSSIEGNYTLRVDCTPLMYSLVHNLTKELKSPDEGFEGKSLYESWTKKSPSPEFSGMPRISKLGSGNDFEVFFQRLGIASGRARYTKNWETNKFSGYPLYHSVYETYELVEKFYDPMFKYHLTVAQVRGGMVFELANSIVLPFDCRDYAVVLRKYADKIYSISMKHPQEMKTYSVSFDSLFSAVKNFTEIASKFSERLQDFDKSNPIVLRMMNDQLMFLERAFIDPLGLPDRPFYRHVIYAPSSHNKYAGESFPGIYDALFDIESKVDPSKAWGEVKRQIYVAAFTVQAAAETLSEVA

SEQ ID NO: 994 - protein, 5 aa, Artificial Sequence
  Synthetic
DYYMY

SEQ ID NO: 995 - protein, 17 aa, Artificial Sequence
  Synthetic
IISDAGYYTYYSDIIKG

SEQ ID NO: 996 - protein, 12 aa, Artificial Sequence
  Synthetic
GFPLLRHGAMDY

SEQ ID NO: 997 - protein, 11 aa, Artificial Sequence
  Synthetic
KASQNVDANVA

SEQ ID NO: 998 - protein, 7 aa, Artificial Sequence
  Synthetic
SASYVYW

SEQ ID NO: 999 - protein, 9 aa, Artificial Sequence
  Synthetic
QQYDQQLIT

SEQ ID NO: 1000 - protein, 121 aa, Artificial Sequence
  Synthetic
QVQLVESGGGLVKPGESLRLSCAASGFTFSDYYMYWVRQAPGKCLEWVAIISDAGYYTYYSDIIKGRFTISRDNAKNSLYLQMNSLKAEDTAVYYCARGFPLLRHGAMDYWGQGTLVTVSS

SEQ ID NO: 1001 - protein, 107 aa, Artificial Sequence
  Synthetic
DIQMTQSPSSLSASVGDRVTITCKASQNVDANVAWYQQKPGQAPKSLIYSASYVYWDVPSRFSGSASGTDFTLTISSVQSEDFATYYCQQYDQQLITFGCGTKLEIK

SEQ ID NO: 1002 - protein, 243 aa, Artificial Sequence
  Synthetic
QVQLVESGGGLVKPGESLRLSCAASGFTFSDYYMYWVRQAPGKCLEWVAIISDAGYYTYYSDIIKGRFTISRDNAKNSLYLQMNSLKAEDTAVYYCARGFPLLRHGAMDYWGQGTLVTVSSGGGGSGGGGSGGGGSDIQMTQSPSSLSASVGDRVTITCKASQNVDANVAWYQQKPGQAPKSLIYSASYVYWDVPSRFSGSASGTDFTLTISSVQSEDFATYYCQQYDQQLITFGCGTKLEIK

SEQ ID NO: 1003 - protein, 498 aa, Artificial Sequence
  Synthetic
QVQLVESGGGLVKPGESLRLSCAASGFTFSDYYMYWVRQAPGKCLEWVAIISDAGYYTYYSDIIKGRFTISRDNAKNSLYLQMNSLKAEDTAVYYCARGFPLLRHGAMDYWGQGTLVTVSSGGGGSGGGGSGGGGSDIQMTQSPSSLSASVGDRVTITCKASQNVDANVAWYQQKPGQAPKSLIYSASYVYWDVPSRFSGSASGTDFTLTISSVQSEDFATYYCQQYDQQLITFGCGTKLEIKSGGGGSEVQLVESGGGLVQPGGSLKLSCAASGFTFNKYAMNWVRQAPGKGLEWVARIRSKYNNYATYYADSVKDRFTISRDDSKNTAYLQMNNLKTEDTAVYYCVRHGNFGNSYISYWAYWGQGTLVTVSSGGGGSGGGGSGGGGSQTVVTQEPSLTVSPGGTVTLTCGSSTGAVTSGNYPNWVQQKPGQAPRGLIGGTKFLAPGTPARFSGSLLGGKAALTLSGVQPEDEAEYYCVLWYSNRWVFGGGTKLTVL

SEQ ID NO: 1004 - protein, 986 aa, Artificial Sequence
  Synthetic
QVQLVESGGGLVKPGESLRLSCAASGFTFSDYYMYWVRQAPGKCLEWVAIISDAGYYTYYSDIIKGRFTISRDNAKNSLYLQMNSLKAEDTAVYYCARGFPLLRHGAMDYWGQGTLVTVSSGGGGSGGGGSGGGGSDIQMTQSPSSLSASVGDRVTITCKASQNVDANVAWYQQKPGQAPKSLIYSASYVYWDVPSRFSGSASGTDFTLTISSVQSEDFATYYCQQYDQQLITFGCGTKLEIKSGGGGSEVQLVESGGGLVQPGGSLKLSCAASGFTFNKYAMNWVRQAPGKGLEWVARIRSKYNNYATYYADSVKDRFTISRDDSKNTAYLQMNNLKTEDTAVYYCVRHGNFGNSYISYWAYWGQGTLVTVSSGGGGSGGGGSGGGGSQTVVTQEPSLTVSPGGTVTLTCGSSTGAVTSGNYPNWVQQKPGQAPRGLIGGTKFLAPGTPARFSGSLLGGKAALTLSGVQPEDEAEYYCVLWYSNRWVFGGGTKLTVLGGGGDKTHTCPPCPAPELLGGPSVFLFPPKPKDTLMISRTPEVTCVVVDVSHEDPEVKFNWYVDGVEVHNAKTKPCEEQYGSTYRCVSVLTVLHQDWLNGKEYKCKVSNKALPAPIEKTISKAKGQPREPQVYTLPPSREEMTKNQVSLTCLVKGFYPSDIAVEWESNGQPENNYKTTPPVLDSDGSFFLYSKLTVDKSRWQQGNVFSCSVMHEALHNHYTQKSLSLSPGKGGGGSGGGGSGGGGSGGGGSGGGGSGGGGSDKTHTCPPCPAPELLGGPSVFLFPPKPKDTLMISRTPEVTCVVVDVSHEDPEVKFNWYVDGVEVHNAKTKPCEEQYGSTYRCVSVLTVLHQDWLNGKEYKCKVSNKALPAPIEKTISKAKGQPREPQVYTLPPSREEMTKNQVSLTCLVKGFYPSDIAVEWESNGQPENNYKTTPPVLDSDGSFFLYSKLTVDKSRWQQGNVFSCSVMHEALHNHYTQKSLSLSPGK

SEQ ID NO: 1005 - protein, 984 aa, Artificial Sequence
  Synthetic
QVQLVESGGGLVKPGESLRLSCAASGFTFSDYYMYWVRQAPGKCLEWVAIISDAGYYTYYSDIIKGRFTISRDNAKNSLYLQMNSLKAEDTAVYYCARGFPLLRHGAMDYWGQGTLVTVSSGGGGSGGGGSGGGGSDIQMTQSPSSLSASVGDRVTITCKASQNVDANVAWYQQKPGQAPKSLIYSASYVYWDVPSRFSGSASGTDFTLTISSVQSEDFATYYCQQYDQQLITFGCGTKLEIKSGGGGSEVQLVESGGGLVQPGGSLKLSCAASGFTFNKYAMNWVRQAPGKGLEWVARIRSKYNNYATYYADSVKDRFTISRDDSKNTAYLQMNNLKTEDTAVYYCVRHGNFGNSYISYWAYWGQGTLVTVSSGGGGSGGGGSGGGGSQTVVTQEPSLTVSPGGTVTLTCGSSTGAVTSGNYPNWVQQKPGQAPRGLIGGTKFLAPGTPARFSGSLLGGKAALTLSGVQPEDEAEYYCVLWYSNRWVFGGGTKLTVLGGGGDKTHTCPPCPAPELLGGPSVFLFPPKPKDTLMISRTPEVTCVVVDVSHEDPEVKFNWYVDGVEVHNAKTKPCEEQYGSTYRCVSVLTVLHQDWLNGKEYKCKVSNKALPAPIEKTISKAKGQPREPQVYTLPPSREEMTKNQVSLTCLVKGFYPSDIAVEWESNGQPENNYKTTPPVLDSDGSFFLYSKLTVDKSRWQQGNVFSCSVMHEALHNHYTQKSLSLSPGGGGSGGGGSGGGGSGGGGSGGGGSGGGGSDKTHTCPPCPAPELLGGPSVFLFPPKPKDTLMISRTPEVTCVVVDVSHEDPEVKFNWYVDGVEVHNAKTKPCEEQYGSTYRCVSVLTVLHQDWLNGKEYKCKVSNKALPAPIEKTISKAKGQPREPQVYTLPPSREEMTKNQVSLTCLVKGFYPSDIAVEWESNGQPENNYKTTPPVLDSDGSFFLYSKLTVDKSRWQQGNVFSCSVMHEALHNHYTQKSLSLSPGK

SEQ ID NO: 1006 - protein, 498 aa, Artificial Sequence
  Synthetic
QVQLVESGGGLVKPGESLRLSCAASGFTFSDYYMYWVRQAPGKCLEWVAIISDAGYYTYYSDIIKGRFTISRDNAKNSLYLQMNSLKAEDTAVYYCARGFPLLRHGAMDYWGQGTLVTVSSGGGGSGGGGSGGGGSDIQMTQSPSSLSASVGDRVTITCKASQNVDANVAWYQQKPGQAPKSLIYSASYVYWDVPSRFSGSASGTDFTLTISSVQSEDFATYYCQQYDQQLITFGCGTKLEIKSGGGGSEVQLVESGGGLVQPGGSLKLSCAASGFTFNKYAMNWVRQAPGKGLEWVARIRSKYNNYATYYADSVKDRFTISRDDSKNTAYLQMNNLKTEDTAVYYCVRHGNFGNSYISYWAYCGQGTLVTVSSGGGGSGGGGSGGGGSQTVVTQEPSLTVSPGGTVTLTCGSSTGAVTSGNYPNWVQQKPGQCPRGLIGGTKFLAPGTPARFSGSLLGGKAALTLSGVQPEDEAEYYCVLWYSNRWVFGGGTKLTVL

SEQ ID NO: 1007 - protein, 986 aa, Artificial Sequence
  Synthetic
QVQLVESGGGLVKPGESLRLSCAASGFTFSDYYMYWVRQAPGKCLEWVAIISDAGYYTYYSDIIKGRFTISRDNAKNSLYLQMNSLKAEDTAVYYCARGFPLLRHGAMDYWGQGTLVTVSSGGGGSGGGGSGGGGSDIQMTQSPSSLSASVGDRVTITCKASQNVDANVAWYQQKPGQAPKSLIYSASYVYWDVPSRFSGSASGTDFTLTISSVQSEDFATYYCQQYDQQLITFGCGTKLEIKSGGGGSEVQLVESGGGLVQPGGSLKLSCAASGFTFNKYAMNWVRQAPGKGLEWVARIRSKYNNYATYYADSVKDRFTISRDDSKNTAYLQMNNLKTEDTAVYYCVRHGNFGNSYISYWAYCGQGTLVTVSSGGGGSGGGGSGGGGSQTVVTQEPSLTVSPGGTVTLTCGSSTGAVTSGNYPNWVQQKPGQCPRGLIGGTKFLAPGTPARFSGSLLGGKAALTLSGVQPEDEAEYYCVLWYSNRWVFGGGTKLTVLGGGGDKTHTCPPCPAPELLGGPSVFLFPPKPKDTLMISRTPEVTCVVVDVSHEDPEVKFNWYVDGVEVHNAKTKPCEEQYGSTYRCVSVLTVLHQDWLNGKEYKCKVSNKALPAPIEKTISKAKGQPREPQVYTLPPSREEMTKNQVSLTCLVKGFYPSDIAVEWESNGQPENNYKTTPPVLDSDGSFFLYSKLTVDKSRWQQGNVFSCSVMHEALHNHYTQKSLSLSPGKGGGGSGGGGSGGGGSGGGGSGGGGSGGGGSDKTHTCPPCPAPELLGGPSVFLFPPKPKDTLMISRTPEVTCVVVDVSHEDPEVKFNWYVDGVEVHNAKTKPCEEQYGSTYRCVSVLTVLHQDWLNGKEYKCKVSNKALPAPIEKTISKAKGQPREPQVYTLPPSREEMTKNQVSLTCLVKGFYPSDIAVEWESNGQPENNYKTTPPVLDSDGSFFLYSKLTVDKSRWQQGNVFSCSVMHEALHNHYTQKSLSLSPGK

SEQ ID NO: 1008 - protein, 984 aa, Artificial Sequence
  Synthetic
QVQLVESGGGLVKPGESLRLSCAASGFTFSDYYMYWVRQAPGKCLEWVAIISDAGYYTYYSDIIKGRFTISRDNAKNSLYLQMNSLKAEDTAVYYCARGFPLLRHGAMDYWGQGTLVTVSSGGGGSGGGGSGGGGSDIQMTQSPSSLSASVGDRVTITCKASQNVDANVAWYQQKPGQAPKSLIYSASYVYWDVPSRFSGSASGTDFTLTISSVQSEDFATYYCQQYDQQLITFGCGTKLEIKSGGGGSEVQLVESGGGLVQPGGSLKLSCAASGFTFNKYAMNWVRQAPGKGLEWVARIRSKYNNYATYYADSVKDRFTISRDDSKNTAYLQMNNLKTEDTAVYYCVRHGNFGNSYISYWAYCGQGTLVTVSSGGGGSGGGGSGGGGSQTVVTQEPSLTVSPGGTVTLTCGSSTGAVTSGNYPNWVQQKPGQCPRGLIGGTKFLAPGTPARFSGSLLGGKAALTLSGVQPEDEAEYYCVLWYSNRWVFGGGTKLTVLGGGGDKTHTCPPCPAPELLGGPSVFLFPPKPKDTLMISRTPEVTCVVVDVSHEDPEVKFNWYVDGVEVHNAKTKPCEEQYGSTYRCVSVLTVLHQDWLNGKEYKCKVSNKALPAPIEKTISKAKGQPREPQVYTLPPSREEMTKNQVSLTCLVKGFYPSDIAVEWESNGQPENNYKTTPPVLDSDGSFFLYSKLTVDKSRWQQGNVFSCSVMHEALHNHYTQKSLSLSPGGGGSGGGGSGGGGSGGGGSGGGGSGGGGSDKTHTCPPCPAPELLGGPSVFLFPPKPKDTLMISRTPEVTCVVVDVSHEDPEVKFNWYVDGVEVHNAKTKPCEEQYGSTYRCVSVLTVLHQDWLNGKEYKCKVSNKALPAPIEKTISKAKGQPREPQVYTLPPSREEMTKNQVSLTCLVKGFYPSDIAVEWESNGQPENNYKTTPPVLDSDGSFFLYSKLTVDKSRWQQGNVFSCSVMHEALHNHYTQKSLSLSPGK

SEQ ID NO: 1009 - protein, 5 aa, Artificial Sequence
  Synthetic
DYYMY

SEQ ID NO: 1010 - protein, 17 aa, Artificial Sequence
  Synthetic
IISDGGYYTYYSDIIKG

SEQ ID NO: 1011 - protein, 12 aa, Artificial Sequence
  Synthetic
GFPLLRHGAMDY

SEQ ID NO: 1012 - protein, 11 aa, Artificial Sequence
  Synthetic
KASQNVDTNVA

SEQ ID NO: 1013 - protein, 7 aa, Artificial Sequence
  Synthetic
SASYVYW

SEQ ID NO: 1014 - protein, 9 aa, Artificial Sequence
  Synthetic
QQYDQQLIT

SEQ ID NO: 1015 - protein, 121 aa, Artificial Sequence
  Synthetic
QVQLVESGGGLVKPGESLRLSCAASGFTFSDYYMYWVRQAPGKGLEWVAIISDGGYYTYYSDIIKGRFTISRDNAKNSLYLQMNSLKAEDTAVYYCARGFPLLRHGAMDYWGQGTLVTVSS

SEQ ID NO: 1016 - protein, 107 aa, Artificial Sequence
  Synthetic
DIQMTQSPSSLSASVGDRVTITCKASQNVDTNVAWYQQKPGQAPKSLIYSASYVYWDVPSRFSGSASGTDFTLTISSVQSEDFATYYCQQYDQQLITFGGGTKLEIK

SEQ ID NO: 1017 - protein, 243 aa, Artificial Sequence
  Synthetic
QVQLVESGGGLVKPGESLRLSCAASGFTFSDYYMYWVRQAPGKGLEWVAIISDGGYYTYYSDIIKGRFTISRDNAKNSLYLQMNSLKAEDTAVYYCARGFPLLRHGAMDYWGQGTLVTVSSGGGGSGGGGSGGGGSDIQMTQSPSSLSASVGDRVTITCKASQNVDTNVAWYQQKPGQAPKSLIYSASYVYWDVPSRFSGSASGTDFTLTISSVQSEDFATYYCQQYDQQLITFGGGTKLEIK

SEQ ID NO: 1018 - protein, 498 aa, Artificial Sequence
  Synthetic
QVQLVESGGGLVKPGESLRLSCAASGFTFSDYYMYWVRQAPGKGLEWVAIISDGGYYTYYSDIIKGRFTISRDNAKNSLYLQMNSLKAEDTAVYYCARGFPLLRHGAMDYWGQGTLVTVSSGGGGSGGGGSGGGGSDIQMTQSPSSLSASVGDRVTITCKASQNVDTNVAWYQQKPGQAPKSLIYSASYVYWDVPSRFSGSASGTDFTLTISSVQSEDFATYYCQQYDQQLITFGGGTKLEIKSGGGGSEVQLVESGGGLVQPGGSLKLSCAASGFTFNKYAMNWVRQAPGKGLEWVARIRSKYNNYATYYADSVKDRFTISRDDSKNTAYLQMNNLKTEDTAVYYCVRHGNFGNSYISYWAYWGQGTLVTVSSGGGGSGGGGSGGGGSQTVVTQEPSLTVSPGGTVTLTCGSSTGAVTSGNYPNWVQQKPGQAPRGLIGGTKFLAPGTPARFSGSLLGGKAALTLSGVQPEDEAEYYCVLWYSNRWVFGGGTKLTVL

SEQ ID NO: 1019 - protein, 986 aa, Artificial Sequence
  Synthetic
QVQLVESGGGLVKPGESLRLSCAASGFTFSDYYMYWVRQAPGKGLEWVAIISDGGYYTYYSDIIKGRFTISRDNAKNSLYLQMNSLKAEDTAVYYCARGFPLLRHGAMDYWGQGTLVTVSSGGGGSGGGGSGGGGSDIQMTQSPSSLSASVGDRVTITCKASQNVDTNVAWYQQKPGQAPKSLIYSASYVYWDVPSRFSGSASGTDFTLTISSVQSEDFATYYCQQYDQQLITFGGGTKLEIKSGGGGSEVQLVESGGGLVQPGGSLKLSCAASGFTFNKYAMNWVRQAPGKGLEWVARIRSKYNNYATYYADSVKDRFTISRDDSKNTAYLQMNNLKTEDTAVYYCVRHGNFGNSYISYWAYWGQGTLVTVSSGGGGSGGGGSGGGGSQTVVTQEPSLTVSPGGTVTLTCGSSTGAVTSGNYPNWVQQKPGQAPRGLIGGTKFLAPGTPARFSGSLLGGKAALTLSGVQPEDEAEYYCVLWYSNRWVFGGGTKLTVLGGGGDKTHTCPPCPAPELLGGPSVFLFPPKPKDTLMISRTPEVTCVVVDVSHEDPEVKFNWYVDGVEVHNAKTKPCEEQYGSTYRCVSVLTVLHQDWLNGKEYKCKVSNKALPAPIEKTISKAKGQPREPQVYTLPPSREEMTKNQVSLTCLVKGFYPSDIAVEWESNGQPENNYKTTPPVLDSDGSFFLYSKLTVDKSRWQQGNVFSCSVMHEALHNHYTQKSLSLSPGKGGGGSGGGGSGGGGSGGGGSGGGGSGGGGSDKTHTCPPCPAPELLGGPSVFLFPPKPKDTLMISRTPEVTCVVVDVSHEDPEVKFNWYVDGVEVHNAKTKPCEEQYGSTYRCVSVLTVLHQDWLNGKEYKCKVSNKALPAPIEKTISKAKGQPREPQVYTLPPSREEMTKNQVSLTCLVKGFYPSDIAVEWESNGQPENNYKTTPPVLDSDGSFFLYSKLTVDKSRWQQGNVFSCSVMHEALHNHYTQKSLSLSPGK

SEQ ID NO: 1020 - protein, 984 aa, Artificial Sequence
  Synthetic
QVQLVESGGGLVKPGESLRLSCAASGFTFSDYYMYWVRQAPGKGLEWVAIISDGGYYTYYSDIIKGRFTISRDNAKNSLYLQMNSLKAEDTAVYYCARGFPLLRHGAMDYWGQGTLVTVSSGGGGSGGGGSGGGGSDIQMTQSPSSLSASVGDRVTITCKASQNVDTNVAWYQQKPGQAPKSLIYSASYVYWDVPSRFSGSASGTDFTLTISSVQSEDFATYYCQQYDQQLITFGGGTKLEIKSGGGGSEVQLVESGGGLVQPGGSLKLSCAASGFTFNKYAMNWVRQAPGKGLEWVARIRSKYNNYATYYADSVKDRFTISRDDSKNTAYLQMNNLKTEDTAVYYCVRHGNFGNSYISYWAYWGQGTLVTVSSGGGGSGGGGSGGGGSQTVVTQEPSLTVSPGGTVTLTCGSSTGAVTSGNYPNWVQQKPGQAPRGLIGGTKFLAPGTPARFSGSLLGGKAALTLSGVQPEDEAEYYCVLWYSNRWVFGGGTKLTVLGGGGDKTHTCPPCPAPELLGGPSVFLFPPKPKDTLMISRTPEVTCVVVDVSHEDPEVKFNWYVDGVEVHNAKTKPCEEQYGSTYRCVSVLTVLHQDWLNGKEYKCKVSNKALPAPIEKTISKAKGQPREPQVYTLPPSREEMTKNQVSLTCLVKGFYPSDIAVEWESNGQPENNYKTTPPVLDSDGSFFLYSKLTVDKSRWQQGNVFSCSVMHEALHNHYTQKSLSLSPGGGGSGGGGSGGGGSGGGGSGGGGSGGGGSDKTHTCPPCPAPELLGGPSVFLFPPKPKDTLMISRTPEVTCVVVDVSHEDPEVKFNWYVDGVEVHNAKTKPCEEQYGSTYRCVSVLTVLHQDWLNGKEYKCKVSNKALPAPIEKTISKAKGQPREPQVYTLPPSREEMTKNQVSLTCLVKGFYPSDIAVEWESNGQPENNYKTTPPVLDSDGSFFLYSKLTVDKSRWQQGNVFSCSVMHEALHNHYTQKSLSLSPGK

SEQ ID NO: 1021 - protein, 498 aa, Artificial Sequence
  Synthetic
QVQLVESGGGLVKPGESLRLSCAASGFTFSDYYMYWVRQAPGKGLEWVAIISDGGYYTYYSDIIKGRFTISRDNAKNSLYLQMNSLKAEDTAVYYCARGFPLLRHGAMDYWGQGTLVTVSSGGGGSGGGGSGGGGSDIQMTQSPSSLSASVGDRVTITCKASQNVDTNVAWYQQKPGQAPKSLIYSASYVYWDVPSRFSGSASGTDFTLTISSVQSEDFATYYCQQYDQQLITFGGGTKLEIKSGGGGSEVQLVESGGGLVQPGGSLKLSCAASGFTFNKYAMNWVRQAPGKGLEWVARIRSKYNNYATYYADSVKDRFTISRDDSKNTAYLQMNNLKTEDTAVYYCVRHGNFGNSYISYWAYCGQGTLVTVSSGGGGSGGGGSGGGGSQTVVTQEPSLTVSPGGTVTLTCGSSTGAVTSGNYPNWVQQKPGQCPRGLIGGTKFLAPGTPARFSGSLLGGKAALTLSGVQPEDEAEYYCVLWYSNRWVFGGGTKLTVL

SEQ ID NO: 1022 - protein, 986 aa, Artificial Sequence
  Synthetic
QVQLVESGGGLVKPGESLRLSCAASGFTFSDYYMYWVRQAPGKGLEWVAIISDGGYYTYYSDIIKGRFTISRDNAKNSLYLQMNSLKAEDTAVYYCARGFPLLRHGAMDYWGQGTLVTVSSGGGGSGGGGSGGGGSDIQMTQSPSSLSASVGDRVTITCKASQNVDTNVAWYQQKPGQAPKSLIYSASYVYWDVPSRFSGSASGTDFTLTISSVQSEDFATYYCQQYDQQLITFGGGTKLEIKSGGGGSEVQLVESGGGLVQPGGSLKLSCAASGFTFNKYAMNWVRQAPGKGLEWVARIRSKYNNYATYYADSVKDRFTISRDDSKNTAYLQMNNLKTEDTAVYYCVRHGNFGNSYISYWAYCGQGTLVTVSSGGGGSGGGGSGGGGSQTVVTQEPSLTVSPGGTVTLTCGSSTGAVTSGNYPNWVQQKPGQCPRGLIGGTKFLAPGTPARFSGSLLGGKAALTLSGVQPEDEAEYYCVLWYSNRWVFGGGTKLTVLGGGGDKTHTCPPCPAPELLGGPSVFLFPPKPKDTLMISRTPEVTCVVVDVSHEDPEVKFNWYVDGVEVHNAKTKPCEEQYGSTYRCVSVLTVLHQDWLNGKEYKCKVSNKALPAPIEKTISKAKGQPREPQVYTLPPSREEMTKNQVSLTCLVKGFYPSDIAVEWESNGQPENNYKTTPPVLDSDGSFFLYSKLTVDKSRWQQGNVFSCSVMHEALHNHYTQKSLSLSPGKGGGGSGGGGSGGGGSGGGGSGGGGSGGGGSDKTHTCPPCPAPELLGGPSVFLFPPKPKDTLMISRTPEVTCVVVDVSHEDPEVKFNWYVDGVEVHNAKTKPCEEQYGSTYRCVSVLTVLHQDWLNGKEYKCKVSNKALPAPIEKTISKAKGQPREPQVYTLPPSREEMTKNQVSLTCLVKGFYPSDIAVEWESNGQPENNYKTTPPVLDSDGSFFLYSKLTVDKSRWQQGNVFSCSVMHEALHNHYTQKSLSLSPGK

SEQ ID NO: 1023 - protein, 984 aa, Artificial Sequence
  Synthetic
QVQLVESGGGLVKPGESLRLSCAASGFTFSDYYMYWVRQAPGKGLEWVAIISDGGYYTYYSDIIKGRFTISRDNAKNSLYLQMNSLKAEDTAVYYCARGFPLLRHGAMDYWGQGTLVTVSSGGGGSGGGGSGGGGSDIQMTQSPSSLSASVGDRVTITCKASQNVDTNVAWYQQKPGQAPKSLIYSASYVYWDVPSRFSGSASGTDFTLTISSVQSEDFATYYCQQYDQQLITFGGGTKLEIKSGGGGSEVQLVESGGGLVQPGGSLKLSCAASGFTFNKYAMNWVRQAPGKGLEWVARIRSKYNNYATYYADSVKDRFTISRDDSKNTAYLQMNNLKTEDTAVYYCVRHGNFGNSYISYWAYCGQGTLVTVSSGGGGSGGGGSGGGGSQTVVTQEPSLTVSPGGTVTLTCGSSTGAVTSGNYPNWVQQKPGQCPRGLIGGTKFLAPGTPARFSGSLLGGKAALTLSGVQPEDEAEYYCVLWYSNRWVFGGGTKLTVLGGGGDKTHTCPPCPAPELLGGPSVFLFPPKPKDTLMISRTPEVTCVVVDVSHEDPEVKFNWYVDGVEVHNAKTKPCEEQYGSTYRCVSVLTVLHQDWLNGKEYKCKVSNKALPAPIEKTISKAKGQPREPQVYTLPPSREEMTKNQVSLTCLVKGFYPSDIAVEWESNGQPENNYKTTPPVLDSDGSFFLYSKLTVDKSRWQQGNVFSCSVMHEALHNHYTQKSLSLSPGGGGSGGGGSGGGGSGGGGSGGGGSGGGGSDKTHTCPPCPAPELLGGPSVFLFPPKPKDTLMISRTPEVTCVVVDVSHEDPEVKFNWYVDGVEVHNAKTKPCEEQYGSTYRCVSVLTVLHQDWLNGKEYKCKVSNKALPAPIEKTISKAKGQPREPQVYTLPPSREEMTKNQVSLTCLVKGFYPSDIAVEWESNGQPENNYKTTPPVLDSDGSFFLYSKLTVDKSRWQQGNVFSCSVMHEALHNHYTQKSLSLSPGK

SEQ ID NO: 1024 - protein, 5 aa, Artificial Sequence
  Synthetic
DYYMY

SEQ ID NO: 1025 - protein, 17 aa, Artificial Sequence
  Synthetic
IISDGGYYTYYSDIIKG

SEQ ID NO: 1026 - protein, 12 aa, Artificial Sequence
  Synthetic
GFPLLRHGAMDY

SEQ ID NO: 1027 - protein, 11 aa, Artificial Sequence
  Synthetic
KASQNVDTNVA

SEQ ID NO: 1028 - protein, 7 aa, Artificial Sequence
  Synthetic
SASYVYW

SEQ ID NO: 1029 - protein, 9 aa, Artificial Sequence
  Synthetic
QQYDQQLIT

SEQ ID NO: 1030 - protein, 121 aa, Artificial Sequence
  Synthetic
QVQLVESGGGLVKPGESLRLSCAASGFTFSDYYMYWVRQAPGKCLEWVAIISDGGYYTYYSDIIKGRFTISRDNAKNSLYLQMNSLKAEDTAVYYCARGFPLLRHGAMDYWGQGTLVTVSS

SEQ ID NO: 1031 - protein, 107 aa, Artificial Sequence
  Synthetic
DIQMTQSPSSLSASVGDRVTITCKASQNVDTNVAWYQQKPGQAPKSLIYSASYVYWDVPSRFSGSASGTDFTLTISSVQSEDFATYYCQQYDQQLITFGCGTKLEIK

SEQ ID NO: 1032 - protein, 243 aa, Artificial Sequence
  Synthetic
QVQLVESGGGLVKPGESLRLSCAASGFTFSDYYMYWVRQAPGKCLEWVAIISDGGYYTYYSDIIKGRFTISRDNAKNSLYLQMNSLKAEDTAVYYCARGFPLLRHGAMDYWGQGTLVTVSSGGGGSGGGGSGGGGSDIQMTQSPSSLSASVGDRVTITCKASQNVDTNVAWYQQKPGQAPKSLIYSASYVYWDVPSRFSGSASGTDFTLTISSVQSEDFATYYCQQYDQQLITFGCGTKLEIK

SEQ ID NO: 1033 - protein, 498 aa, Artificial Sequence
  Synthetic
QVQLVESGGGLVKPGESLRLSCAASGFTFSDYYMYWVRQAPGKCLEWVAIISDGGYYTYYSDIIKGRFTISRDNAKNSLYLQMNSLKAEDTAVYYCARGFPLLRHGAMDYWGQGTLVTVSSGGGGSGGGGSGGGGSDIQMTQSPSSLSASVGDRVTITCKASQNVDTNVAWYQQKPGQAPKSLIYSASYVYWDVPSRFSGSASGTDFTLTISSVQSEDFATYYCQQYDQQLITFGCGTKLEIKSGGGGSEVQLVESGGGLVQPGGSLKLSCAASGFTFNKYAMNWVRQAPGKGLEWVARIRSKYNNYATYYADSVKDRFTISRDDSKNTAYLQMNNLKTEDTAVYYCVRHGNFGNSYISYWAYWGQGTLVTVSSGGGGSGGGGSGGGGSQTVVTQEPSLTVSPGGTVTLTCGSSTGAVTSGNYPNWVQQKPGQAPRGLIGGTKFLAPGTPARFSGSLLGGKAALTLSGVQPEDEAEYYCVLWYSNRWVFGGGTKLTVL

SEQ ID NO: 1034 - protein, 986 aa, Artificial Sequence
  Synthetic
QVQLVESGGGLVKPGESLRLSCAASGFTFSDYYMYWVRQAPGKCLEWVAIISDGGYYTYYSDIIKGRFTISRDNAKNSLYLQMNSLKAEDTAVYYCARGFPLLRHGAMDYWGQGTLVTVSSGGGGSGGGGSGGGGSDIQMTQSPSSLSASVGDRVTITCKASQNVDTNVAWYQQKPGQAPKSLIYSASYVYWDVPSRFSGSASGTDFTLTISSVQSEDFATYYCQQYDQQLITFGCGTKLEIKSGGGGSEVQLVESGGGLVQPGGSLKLSCAASGFTFNKYAMNWVRQAPGKGLEWVARIRSKYNNYATYYADSVKDRFTISRDDSKNTAYLQMNNLKTEDTAVYYCVRHGNFGNSYISYWAYWGQGTLVTVSSGGGGSGGGGSGGGGSQTVVTQEPSLTVSPGGTVTLTCGSSTGAVTSGNYPNWVQQKPGQAPRGLIGGTKFLAPGTPARFSGSLLGGKAALTLSGVQPEDEAEYYCVLWYSNRWVFGGGTKLTVLGGGGDKTHTCPPCPAPELLGGPSVFLFPPKPKDTLMISRTPEVTCVVVDVSHEDPEVKFNWYVDGVEVHNAKTKPCEEQYGSTYRCVSVLTVLHQDWLNGKEYKCKVSNKALPAPIEKTISKAKGQPREPQVYTLPPSREEMTKNQVSLTCLVKGFYPSDIAVEWESNGQPENNYKTTPPVLDSDGSFFLYSKLTVDKSRWQQGNVFSCSVMHEALHNHYTQKSLSLSPGKGGGGSGGGGSGGGGSGGGGSGGGGSGGGGSDKTHTCPPCPAPELLGGPSVFLFPPKPKDTLMISRTPEVTCVVVDVSHEDPEVKFNWYVDGVEVHNAKTKPCEEQYGSTYRCVSVLTVLHQDWLNGKEYKCKVSNKALPAPIEKTISKAKGQPREPQVYTLPPSREEMTKNQVSLTCLVKGFYPSDIAVEWESNGQPENNYKTTPPVLDSDGSFFLYSKLTVDKSRWQQGNVFSCSVMHEALHNHYTQKSLSLSPGK

SEQ ID NO: 1035 - protein, 984 aa, Artificial Sequence
  Synthetic
QVQLVESGGGLVKPGESLRLSCAASGFTFSDYYMYWVRQAPGKCLEWVAIISDGGYYTYYSDIIKGRFTISRDNAKNSLYLQMNSLKAEDTAVYYCARGFPLLRHGAMDYWGQGTLVTVSSGGGGSGGGGSGGGGSDIQMTQSPSSLSASVGDRVTITCKASQNVDTNVAWYQQKPGQAPKSLIYSASYVYWDVPSRFSGSASGTDFTLTISSVQSEDFATYYCQQYDQQLITFGCGTKLEIKSGGGGSEVQLVESGGGLVQPGGSLKLSCAASGFTFNKYAMNWVRQAPGKGLEWVARIRSKYNNYATYYADSVKDRFTISRDDSKNTAYLQMNNLKTEDTAVYYCVRHGNFGNSYISYWAYWGQGTLVTVSSGGGGSGGGGSGGGGSQTVVTQEPSLTVSPGGTVTLTCGSSTGAVTSGNYPNWVQQKPGQAPRGLIGGTKFLAPGTPARFSGSLLGGKAALTLSGVQPEDEAEYYCVLWYSNRWVFGGGTKLTVLGGGGDKTHTCPPCPAPELLGGPSVFLFPPKPKDTLMISRTPEVTCVVVDVSHEDPEVKFNWYVDGVEVHNAKTKPCEEQYGSTYRCVSVLTVLHQDWLNGKEYKCKVSNKALPAPIEKTISKAKGQPREPQVYTLPPSREEMTKNQVSLTCLVKGFYPSDIAVEWESNGQPENNYKTTPPVLDSDGSFFLYSKLTVDKSRWQQGNVFSCSVMHEALHNHYTQKSLSLSPGGGGSGGGGSGGGGSGGGGSGGGGSGGGGSDKTHTCPPCPAPELLGGPSVFLFPPKPKDTLMISRTPEVTCVVVDVSHEDPEVKFNWYVDGVEVHNAKTKPCEEQYGSTYRCVSVLTVLHQDWLNGKEYKCKVSNKALPAPIEKTISKAKGQPREPQVYTLPPSREEMTKNQVSLTCLVKGFYPSDIAVEWESNGQPENNYKTTPPVLDSDGSFFLYSKLTVDKSRWQQGNVFSCSVMHEALHNHYTQKSLSLSPGK

SEQ ID NO: 1036 - protein, 498 aa, Artificial Sequence
  Synthetic
QVQLVESGGGLVKPGESLRLSCAASGFTFSDYYMYWVRQAPGKCLEWVAIISDGGYYTYYSDIIKGRFTISRDNAKNSLYLQMNSLKAEDTAVYYCARGFPLLRHGAMDYWGQGTLVTVSSGGGGSGGGGSGGGGSDIQMTQSPSSLSASVGDRVTITCKASQNVDTNVAWYQQKPGQAPKSLIYSASYVYWDVPSRFSGSASGTDFTLTISSVQSEDFATYYCQQYDQQLITFGCGTKLEIKSGGGGSEVQLVESGGGLVQPGGSLKLSCAASGFTFNKYAMNWVRQAPGKGLEWVARIRSKYNNYATYYADSVKDRFTISRDDSKNTAYLQMNNLKTEDTAVYYCVRHGNFGNSYISYWAYCGQGTLVTVSSGGGGSGGGGSGGGGSQTVVTQEPSLTVSPGGTVTLTCGSSTGAVTSGNYPNWVQQKPGQCPRGLIGGTKFLAPGTPARFSGSLLGGKAALTLSGVQPEDEAEYYCVLWYSNRWVFGGGTKLTVL

SEQ ID NO: 1037 - protein, 986 aa, Artificial Sequence
  Synthetic
QVQLVESGGGLVKPGESLRLSCAASGFTFSDYYMYWVRQAPGKCLEWVAIISDGGYYTYYSDIIKGRFTISRDNAKNSLYLQMNSLKAEDTAVYYCARGFPLLRHGAMDYWGQGTLVTVSSGGGGSGGGGSGGGGSDIQMTQSPSSLSASVGDRVTITCKASQNVDTNVAWYQQKPGQAPKSLIYSASYVYWDVPSRFSGSASGTDFTLTISSVQSEDFATYYCQQYDQQLITFGCGTKLEIKSGGGGSEVQLVESGGGLVQPGGSLKLSCAASGFTFNKYAMNWVRQAPGKGLEWVARIRSKYNNYATYYADSVKDRFTISRDDSKNTAYLQMNNLKTEDTAVYYCVRHGNFGNSYISYWAYCGQGTLVTVSSGGGGSGGGGSGGGGSQTVVTQEPSLTVSPGGTVTLTCGSSTGAVTSGNYPNWVQQKPGQCPRGLIGGTKFLAPGTPARFSGSLLGGKAALTLSGVQPEDEAEYYCVLWYSNRWVFGGGTKLTVLGGGGDKTHTCPPCPAPELLGGPSVFLFPPKPKDTLMISRTPEVTCVVVDVSHEDPEVKFNWYVDGVEVHNAKTKPCEEQYGSTYRCVSVLTVLHQDWLNGKEYKCKVSNKALPAPIEKTISKAKGQPREPQVYTLPPSREEMTKNQVSLTCLVKGFYPSDIAVEWESNGQPENNYKTTPPVLDSDGSFFLYSKLTVDKSRWQQGNVFSCSVMHEALHNHYTQKSLSLSPGKGGGGSGGGGSGGGGSGGGGSGGGGSGGGGSDKTHTCPPCPAPELLGGPSVFLFPPKPKDTLMISRTPEVTCVVVDVSHEDPEVKFNWYVDGVEVHNAKTKPCEEQYGSTYRCVSVLTVLHQDWLNGKEYKCKVSNKALPAPIEKTISKAKGQPREPQVYTLPPSREEMTKNQVSLTCLVKGFYPSDIAVEWESNGQPENNYKTTPPVLDSDGSFFLYSKLTVDKSRWQQGNVFSCSVMHEALHNHYTQKSLSLSPGK

SEQ ID NO: 1038 - protein, 984 aa, Artificial Sequence
  Synthetic
QVQLVESGGGLVKPGESLRLSCAASGFTFSDYYMYWVRQAPGKCLEWVAIISDGGYYTYYSDIIKGRFTISRDNAKNSLYLQMNSLKAEDTAVYYCARGFPLLRHGAMDYWGQGTLVTVSSGGGGSGGGGSGGGGSDIQMTQSPSSLSASVGDRVTITCKASQNVDTNVAWYQQKPGQAPKSLIYSASYVYWDVPSRFSGSASGTDFTLTISSVQSEDFATYYCQQYDQQLITFGCGTKLEIKSGGGGSEVQLVESGGGLVQPGGSLKLSCAASGFTFNKYAMNWVRQAPGKGLEWVARIRSKYNNYATYYADSVKDRFTISRDDSKNTAYLQMNNLKTEDTAVYYCVRHGNFGNSYISYWAYCGQGTLVTVSSGGGGSGGGGSGGGGSQTVVTQEPSLTVSPGGTVTLTCGSSTGAVTSGNYPNWVQQKPGQCPRGLIGGTKFLAPGTPARFSGSLLGGKAALTLSGVQPEDEAEYYCVLWYSNRWVFGGGTKLTVLGGGGDKTHTCPPCPAPELLGGPSVFLFPPKPKDTLMISRTPEVTCVVVDVSHEDPEVKFNWYVDGVEVHNAKTKPCEEQYGSTYRCVSVLTVLHQDWLNGKEYKCKVSNKALPAPIEKTISKAKGQPREPQVYTLPPSREEMTKNQVSLTCLVKGFYPSDIAVEWESNGQPENNYKTTPPVLDSDGSFFLYSKLTVDKSRWQQGNVFSCSVMHEALHNHYTQKSLSLSPGGGGSGGGGSGGGGSGGGGSGGGGSGGGGSDKTHTCPPCPAPELLGGPSVFLFPPKPKDTLMISRTPEVTCVVVDVSHEDPEVKFNWYVDGVEVHNAKTKPCEEQYGSTYRCVSVLTVLHQDWLNGKEYKCKVSNKALPAPIEKTISKAKGQPREPQVYTLPPSREEMTKNQVSLTCLVKGFYPSDIAVEWESNGQPENNYKTTPPVLDSDGSFFLYSKLTVDKSRWQQGNVFSCSVMHEALHNHYTQKSLSLSPGK

SEQ ID NO: 1039 - protein, 618 aa, Homo Sapiens
MVSPRMSGLLSQTVILALIFLPQTRPAGVFELQIHSFGPGPGPGAPRSPCSARLPCRLFFRVCLKPGLSEEAAESPCALGAALSARGPVYTEQPGAPAPDLPLPDGLLQVPFRDAWPGTFSFIIETWREELGDQIGGPAWSLLARVAGRRRLAAGGPWARDIQRAGAWELRFSYRARCEPPAVGTACTRLCRPRSAPSRCGPGLRPCAPLEDECEAPLVCRAGCSPEHGFCEQPGECRCLEGWTGPLCTVPVSTSSCLSPRGPSSATTGCLVPGPGPCDGNPCANGGSCSETPRSFECTCPRGFYGLRCEVSGVTCADGPCFNGGLCVGGADPDSAYICHCPPGFQGSNCEKRVDRCSLQPCRNGGLCLDLGHALRCRCRAGFAGPRCEHDLDDCAGRACANGGTCVEGGGAHRCSCALGFGGRDCRERADPCAARPCAHGGRCYAHFSGLVCACAPGYMGARCEFPVHPDGASALPAAPPGLRPGDPQRYLLPPALGLLVAAGVAGAALLLVHVRRRGHSQDAGSRLLAGTPEPSVHALPDALNNLRTQEGSGDGPSSSVDWNRPEDVDPQGIYVISAPSIYAREVATPLFPPLHTGRAGQRQHLLFPYPSSILSVK

SEQ ID NO: 1040 - protein, 5 aa, Artificial Sequence
  Synthetic
SYYWS

SEQ ID NO: 1041 - protein, 16 aa, Artificial Sequence
  Synthetic
YVYYSGTTNYNPSLKS

SEQ ID NO: 1042 - protein, 10 aa, Artificial Sequence
  Synthetic
IAVTGFYFDY

SEQ ID NO: 1043 - protein, 12 aa, Artificial Sequence
  Synthetic
RASQRVNNNYLA

SEQ ID NO: 1044 - protein, 7 aa, Artificial Sequence
  Synthetic
GASSRAT

SEQ ID NO: 1045 - protein, 9 aa, Artificial Sequence
  Synthetic
QQYDRSPLT

SEQ ID NO: 1046 - protein, 5 aa, Artificial Sequence
  Synthetic
SYYWS

SEQ ID NO: 1047 - protein, 16 aa, Artificial Sequence
  Synthetic
YIYYSGRTNYYPSLKS

SEQ ID NO: 1048 - protein, 10 aa, Artificial Sequence
  Synthetic
IAVAGFFFDY

SEQ ID NO: 1049 - protein, 12 aa, Artificial Sequence
  Synthetic
RASQSVNKNYLA

SEQ ID NO: 1050 - protein, 7 aa, Artificial Sequence
  Synthetic
GASSRAT

SEQ ID NO: 1051 - protein, 9 aa, Artificial Sequence
  Synthetic
QQYDRSPLT

SEQ ID NO: 1052 - protein, 5 aa, Artificial Sequence
  Synthetic
SFYWS

SEQ ID NO: 1053 - protein, 16 aa, Artificial Sequence
  Synthetic
YIYYSGTTNYNPSLKS

SEQ ID NO: 1054 - protein, 10 aa, Artificial Sequence
  Synthetic
IAVAGFFFDY

SEQ ID NO: 1055 - protein, 12 aa, Artificial Sequence
  Synthetic
RASQSVNKNYLA

SEQ ID NO: 1056 - protein, 7 aa, Artificial Sequence
  Synthetic
GASSRAT

SEQ ID NO: 1057 - protein, 9 aa, Artificial Sequence
  Synthetic
QQYDRSPLT

SEQ ID NO: 1058 - protein, 5 aa, Artificial Sequence
  Synthetic
SFYWS

SEQ ID NO: 1059 - protein, 16 aa, Artificial Sequence
  Synthetic
YIYYSGTTNYNPSLKS

SEQ ID NO: 1060 - protein, 10 aa, Artificial Sequence
  Synthetic
IAVAGFFFDY

SEQ ID NO: 1061 - protein, 12 aa, Artificial Sequence
  Synthetic
RASQSVNKNYLA

SEQ ID NO: 1062 - protein, 7 aa, Artificial Sequence
  Synthetic
GASSRAT

SEQ ID NO: 1063 - protein, 9 aa, Artificial Sequence
  Synthetic
QQYDRSPLT

SEQ ID NO: 1064 - protein, 5 aa, Artificial Sequence
  Synthetic
SFYWS

SEQ ID NO: 1065 - protein, 16 aa, Artificial Sequence
  Synthetic
YIYYSGTTNYNPSLKS

SEQ ID NO: 1066 - protein, 10 aa, Artificial Sequence
  Synthetic
IAVAGFFFDY

SEQ ID NO: 1067 - protein, 12 aa, Artificial Sequence
  Synthetic
RASQSVNKNYLA

SEQ ID NO: 1068 - protein, 7 aa, Artificial Sequence
  Synthetic
GASSRAT

SEQ ID NO: 1069 - protein, 9 aa, Artificial Sequence
  Synthetic
QQYDRSPLT

SEQ ID NO: 1070 - protein, 5 aa, Artificial Sequence
  Synthetic
SFYWS

SEQ ID NO: 1071 - protein, 16 aa, Artificial Sequence
  Synthetic
YIYYSGTTNYNPSLKS

SEQ ID NO: 1072 - protein, 10 aa, Artificial Sequence
  Synthetic
IAVAGFFFDY

SEQ ID NO: 1073 - protein, 12 aa, Artificial Sequence
  Synthetic
RASQSVNKNYLA

SEQ ID NO: 1074 - protein, 7 aa, Artificial Sequence
  Synthetic
GASSRAT

SEQ ID NO: 1075 - protein, 9 aa, Artificial Sequence
  Synthetic
QQYDRSPLT

SEQ ID NO: 1076 - protein, 5 aa, Artificial Sequence
  Synthetic
SYYWS

SEQ ID NO: 1077 - protein, 16 aa, Artificial Sequence
  Synthetic
YIFYNGITNYNPSLKS

SEQ ID NO: 1078 - protein, 10 aa, Artificial Sequence
  Synthetic
IHSGSFSFDY

SEQ ID NO: 1079 - protein, 12 aa, Artificial Sequence
  Synthetic
RASQSVSRGYLA

SEQ ID NO: 1080 - protein, 7 aa, Artificial Sequence
  Synthetic
GASSRAT

SEQ ID NO: 1081 - protein, 9 aa, Artificial Sequence
  Synthetic
QQYDTSPIT

SEQ ID NO: 1082 - protein, 5 aa, Artificial Sequence
  Synthetic
NAGMS

SEQ ID NO: 1083 - protein, 19 aa, Artificial Sequence
  Synthetic
RIKNKIDGGTTDFAAPVKG

SEQ ID NO: 1084 - protein, 10 aa, Artificial Sequence
  Synthetic
RGWYGDYFDY

SEQ ID NO: 1085 - protein, 16 aa, Artificial Sequence
  Synthetic
RSSQSLLHSNGYNYLD

SEQ ID NO: 1086 - protein, 7 aa, Artificial Sequence
  Synthetic
LGSNRAS

SEQ ID NO: 1087 - protein, 9 aa, Artificial Sequence
  Synthetic
MQALQTPFT

SEQ ID NO: 1088 - protein, 5 aa, Artificial Sequence
  Synthetic
SYDIH

SEQ ID NO: 1089 - protein, 17 aa, Artificial Sequence
  Synthetic
VISSHGSNKNYARSVKG

SEQ ID NO: 1090 - protein, 18 aa, Artificial Sequence
  Synthetic
DGYSGNDPFYYYYHGMDV

SEQ ID NO: 1091 - protein, 11 aa, Artificial Sequence
  Synthetic
RASQSISSYLN

SEQ ID NO: 1092 - protein, 7 aa, Artificial Sequence
  Synthetic
AASSLQS

SEQ ID NO: 1093 - protein, 9 aa, Artificial Sequence
  Synthetic
QQSFTTPLT

SEQ ID NO: 1094 - protein, 118 aa, Artificial Sequence
  Synthetic
QVQLQESGPGLVKPSETLSLTCTVSGGSISSYYWSWIRQPPGKGLEWIGYVYYSGTTNYNPSLKSRVTISVDTSKNQFSLKLSSVTAADTAVYYCASIAVTGFYFDYWGQGTLVTVSS

SEQ ID NO: 1095 - protein, 118 aa, Artificial Sequence
  Synthetic
QVQLQESGPGLVKPSETLSLTCTVSGGSISSYYWSWIRQPPGKGLEWIGYIYYSGRTNYYPSLKSRVTISIDTSKNQFSLKLSSVTAADTAVYYCARIAVAGFFFDYWGQGTLVTVSS

SEQ ID NO: 1096 - protein, 118 aa, Artificial Sequence
  Synthetic
QVQLQESGPGLVKPSETLSLTCTVSGASISSFYWSWIRQPPGKGLEWIGYIYYSGTTNYNPSLKSRVTISVDTSKNQFSLKLSSVTAADTAVYYCARIAVAGFFFDYWGQGTLVTVSS

SEQ ID NO: 1097 - protein, 118 aa, Artificial Sequence
  Synthetic
QVQLQESGPGLVKPSQTLSLTCTVSGASISSFYWSWIRQPPGKGLEWIGYIYYSGTTNYNPSLKSRVTISVDTSKNQFSLKLSSVTAADTAVYYCARIAVAGFFFDYWGQGTLVTVSS

SEQ ID NO: 1098 - protein, 119 aa, Artificial Sequence
  Synthetic
QVQLQEWGPGLVKPSETLSLTCTVSGASISSFYWSWIRQPPGKGLEWIGYIYYSGTTNYNPSLKSRVTISVDTSKNQLSLKLSSVTAADTAVYYCARIAVAGFFFDYWGQGTLVTVSSK

SEQ ID NO: 1099 - protein, 118 aa, Artificial Sequence; identical to SEQ ID NO: 1096
  Synthetic

SEQ ID NO: 1100 - protein, 118 aa, Artificial Sequence
  Synthetic
QVQLQESGPGLVKPSQTLSLTCTVSGGSISSYYWSWIRQPPGKGLEWIGYIFYNGITNYNPSLKSRVTISLDTSKNQFSLKLSSVTAADTAKYYCARIHSGSFSFDYWDQGTLVTVSS

SEQ ID NO: 1101 - protein, 121 aa, Artificial Sequence
  Synthetic
EVQLVESGGGLVKPGGSLRLSCAASGFIFNNAGMSWVRQAPGKGLEWVGRIKNKIDGGTTDFAAPVKGRFTISRDDSKNTLYLQMNSLKAEDTAVYYCTARGWYGDYFDYWGQGTLVTVSS

SEQ ID NO: 1102 - protein, 127 aa, Artificial Sequence
  Synthetic
QVQLVESGGGVVQPGRSLRLSCAASGFSFSSYDIHWVRQAPGKGLEWVAVISSHGSNKNYARSVKGRFTISRDNSKNTLYLQMNSLKAEDTAVYYCARDGYSGNDPFYYYYHGMDVWGQGTTVTVSS

SEQ ID NO: 1103 - protein, 118 aa, Artificial Sequence
  Synthetic
QVQLQESGPGLVKPSETLSLTCTVSGGSISSYYWSWIRQPPGKCLEWIGYVYYSGTTNYNPSLKSRVTISVDTSKNQFSLKLSSVTAADTAVYYCASIAVTGFYFDYWGQGTLVTVSS

SEQ ID NO: 1104 - protein, 118 aa, Artificial Sequence
  Synthetic
QVQLQESGPGLVKPSETLSLTCTVSGASISSFYWSWIRQPPGKCLEWIGYIYYSGTTNYNPSLKSRVTISVDTSKNQFSLKLSSVTAADTAVYYCARIAVAGFFFDYWGQGTLVTVSS

SEQ ID NO: 1105 - protein, 108 aa, Artificial Sequence
  Synthetic
EIVLTQSPGTLSLSPGERVTLSCRASQRVNNNYLAWYQQRPGQAPRLLIYGASSRATGIPDRFSGSGSGTDFTLTISRLEPEDFAVYYCQQYDRSPLTFGGGTKLEIK

SEQ ID NO: 1106 - protein, 108 aa, Artificial Sequence
  Synthetic
EIVLTQSPGTLSLSPGERATLSCRASQSVNKNYLAWYQQKPGQAPRLLIYGASSRATGIPDRFSGSGSGTDFTLTISRLEPEDFAVYYCQQYDRSPLTFGGGTKLEIK

SEQ ID NO: 1107 - protein, 108 aa, Artificial Sequence
  Synthetic
EIVLTQSPGTLSLSPGERATLSCRASQSVNKNYLAWYQQKPGQAPRLLIYGASSRATGIPDRFSGSGSGTDFTLTISRLEPEDFAVYYCQQYDRSPLTFGGGTKVEIK

SEQ ID NO: 1108 - protein, 108 aa, Artificial Sequence; identical to SEQ ID NO: 1107
  Synthetic

SEQ ID NO: 1109 - protein, 108 aa, Artificial Sequence
  Synthetic
EIVLTQSPGTLSLSPGERATLSCRASQSVNKNYLAWYQQKPGQAPRLLIYGASSRATGIPDRFSGSGSGTDFTLTISRLEPEDFAVYYCQQYDRSPLTFGGGTKVDIK

SEQ ID NO: 1110 - protein, 108 aa, Artificial Sequence
  Synthetic
EIVLTQSPGTLSLSPGESATLSCRASQSVNKNYLAWYQQKPGQAPRLLIYGASSRATGIPDRFSGSGSGTDFTLTISRLEPEDFAVYYCQQYDRSPLTFGGGTRLEIK

SEQ ID NO: 1111 - protein, 108 aa, Artificial Sequence
  Synthetic
EIVMTQSPGTLSLSPGERATLSCRASQSVSRGYLAWYQQKPGQAPRLLIYGASSRATDIPDRFSGSGSGTDFTLTISRLEPEDFAVYYCQQYDTSPITFGQGTKVEIK

SEQ ID NO: 1112 - protein, 112 aa, Artificial Sequence
  Synthetic
DIVMTQTPLSLPVTPGEPASISCRSSQSLLHSNGYNYLDWYLQKPGQSPQLLIYLGSNRASGVPDRFSGSGSGTDFTLKISRVEAEDVGIYYCMQALQTPFTFGPGTKVEIK

SEQ ID NO: 1113 - protein, 107 aa, Artificial Sequence
  Synthetic
DIQMTQSPSSLSASVGDRVTITCRASQSISSYLNWYQQKPGKAPKLLIYAASSLQSGVPSRFSGSGSGTDFSLTISSLQPEDFATYYCQQSFTTPLTFGGGTKVEIK

SEQ ID NO: 1114 - protein, 108 aa, Artificial Sequence
  Synthetic
EIVLTQSPGTLSLSPGERVTLSCRASQRVNNNYLAWYQQRPGQAPRLLIYGASSRATGIPDRFSGSGSGTDFTLTISRLEPEDFAVYYCQQYDRSPLTFGCGTKLEIK

SEQ ID NO: 1115 - protein, 108 aa, Artificial Sequence
  Synthetic
EIVLTQSPGTLSLSPGERATLSCRASQSVNKNYLAWYQQKPGQAPRLLIYGASSRATGIPDRFSGSGSGTDFTLTISRLEPEDFAVYYCQQYDRSPLTFGCGTKVEIK

SEQ ID NO: 1116 - protein, 241 aa, Artificial Sequence
  Synthetic
QVQLQESGPGLVKPSETLSLTCTVSGGSISSYYWSWIRQPPGKGLEWIGYVYYSGTTNYNPSLKSRVTISVDTSKNQFSLKLSSVTAADTAVYYCASIAVTGFYFDYWGQGTLVTVSSGGGGSGGGGSGGGGSEIVLTQSPGTLSLSPGERVTLSCRASQRVNNNYLAWYQQRPGQAPRLLIYGASSRATGIPDRFSGSGSGTDFTLTISRLEPEDFAVYYCQQYDRSPLTFGGGTKLEIK

SEQ ID NO: 1117 - protein, 241 aa, Artificial Sequence
  Synthetic
QVQLQESGPGLVKPSETLSLTCTVSGGSISSYYWSWIRQPPGKGLEWIGYIYYSGRTNYYPSLKSRVTISIDTSKNQFSLKLSSVTAADTAVYYCARIAVAGFFFDYWGQGTLVTVSSGGGGSGGGGSGGGGSEIVLTQSPGTLSLSPGERATLSCRASQSVNKNYLAWYQQKPGQAPRLLIYGASSRATGIPDRFSGSGSGTDFTLTISRLEPEDFAVYYCQQYDRSPLTFGGGTKLEIK

SEQ ID NO: 1118 - protein, 241 aa, Artificial Sequence
  Synthetic
QVQLQESGPGLVKPSETLSLTCTVSGASISSFYWSWIRQPPGKGLEWIGYIYYSGTTNYNPSLKSRVTISVDTSKNQFSLKLSSVTAADTAVYYCARIAVAGFFFDYWGQGTLVTVSSGGGGSGGGGSGGGGSEIVLTQSPGTLSLSPGERATLSCRASQSVNKNYLAWYQQKPGQAPRLLIYGASSRATGIPDRFSGSGSGTDFTLTISRLEPEDFAVYYCQQYDRSPLTFGGGTKVEIK

SEQ ID NO: 1119 - protein, 241 aa, Artificial Sequence
  Synthetic
QVQLQESGPGLVKPSQTLSLTCTVSGASISSFYWSWIRQPPGKGLEWIGYIYYSGTTNYNPSLKSRVTISVDTSKNQFSLKLSSVTAADTAVYYCARIAVAGFFFDYWGQGTLVTVSSGGGGSGGGGSGGGGSEIVLTQSPGTLSLSPGERATLSCRASQSVNKNYLAWYQQKPGQAPRLLIYGASSRATGIPDRFSGSGSGTDFTLTISRLEPEDFAVYYCQQYDRSPLTFGGGTKVEIK

SEQ ID NO: 1120 - protein, 241 aa, Artificial Sequence
  Synthetic
QVQLQEWGPGLVKPSETLSLTCTVSGASISSFYWSWIRQPPGKGLEWIGYIYYSGTTNYNPSLKSRVTISVDTSKNQLSLKLSSVTAADTAVYYCARIAVAGFFFDYWGQGTLVTVSSGGGGSGGGGSGGGGSEIVLTQSPGTLSLSPGERATLSCRASQSVNKNYLAWYQQKPGQAPRLLIYGASSRATGIPDRFSGSGSGTDFTLTISRLEPEDFAVYYCQQYDRSPLTFGGGTKVDIK

SEQ ID NO: 1121 - protein, 241 aa, Artificial Sequence
  Synthetic
QVQLQESGPGLVKPSETLSLTCTVSGASISSFYWSWIRQPPGKGLEWIGYIYYSGTTNYNPSLKSRVTISVDTSKNQFSLKLSSVTAADTAVYYCARIAVAGFFFDYWGQGTLVTVSSGGGGSGGGGSGGGGSEIVLTQSPGTLSLSPGESATLSCRASQSVNKNYLAWYQQKPGQAPRLLIYGASSRATGIPDRFSGSGSGTDFTLTISRLEPEDFAVYYCQQYDRSPLTFGGGTRLEIK

SEQ ID NO: 1122 - protein, 241 aa, Artificial Sequence
  Synthetic
QVQLQESGPGLVKPSQTLSLTCTVSGGSISSYYWSWIRQPPGKGLEWIGYIFYNGITNYNPSLKSRVTISLDTSKNQFSLKLSSVTAADTAKYYCARIHSGSFSFDYWDQGTLVTVSSGGGGSGGGGSGGGGSEIVMTQSPGTLSLSPGERATLSCRASQSVSRGYLAWYQQKPGQAPRLLIYGASSRATDIPDRFSGSGSGTDFTLTISRLEPEDFAVYYCQQYDTSPITFGQGTKVEIK

SEQ ID NO: 1123 - protein, 248 aa, Artificial Sequence
  Synthetic
EVQLVESGGGLVKPGGSLRLSCAASGFIFNNAGMSWVRQAPGKGLEWVGRIKNKIDGGTTDFAAPVKGRFTISRDDSKNTLYLQMNSLKAEDTAVYYCTARGWYGDYFDYWGQGTLVTVSSGGGGSGGGGSGGGGSDIVMTQTPLSLPVTPGEPASISCRSSQSLLHSNGYNYLDWYLQKPGQSPQLLIYLGSNRASGVPDRFSGSGSGTDFTLKISRVEAEDVGIYYCMQALQTPFTFGPGTKVEIK

SEQ ID NO: 1124 - protein, 249 aa, Artificial Sequence
  Synthetic
QVQLVESGGGVVQPGRSLRLSCAASGFSFSSYDIHWVRQAPGKGLEWVAVISSHGSNKNYARSVKGRFTISRDNSKNTLYLQMNSLKAEDTAVYYCARDGYSGNDPFYYYYHGMDVWGQGTTVTVSSGGGGSGGGGSGGGGSDIQMTQSPSSLSASVGDRVTITCRASQSISSYLNWYQQKPGKAPKLLIYAASSLQSGVPSRFSGSGSGTDFSLTISSLQPEDFATYYCQQSFTTPLTFGGGTKVEIK

SEQ ID NO: 1125 - protein, 241 aa, Artificial Sequence
  Synthetic
QVQLQESGPGLVKPSETLSLTCTVSGGSISSYYWSWIRQPPGKCLEWIGYVYYSGTTNYNPSLKSRVTISVDTSKNQFSLKLSSVTAADTAVYYCASIAVTGFYFDYWGQGTLVTVSSGGGGSGGGGSGGGGSEIVLTQSPGTLSLSPGERVTLSCRASQRVNNNYLAWYQQRPGQAPRLLIYGASSRATGIPDRFSGSGSGTDFTLTISRLEPEDFAVYYCQQYDRSPLTFGCGTKLEIK

SEQ ID NO: 1126 - protein, 241 aa, Artificial Sequence
  Synthetic
QVQLQESGPGLVKPSETLSLTCTVSGASISSFYWSWIRQPPGKCLEWIGYIYYSGTTNYNPSLKSRVTISVDTSKNQFSLKLSSVTAADTAVYYCARIAVAGFFFDYWGQGTLVTVSSGGGGSGGGGSGGGGSEIVLTQSPGTLSLSPGERATLSCRASQSVNKNYLAWYQQKPGQAPRLLIYGASSRATGIPDRFSGSGSGTDFTLTISRLEPEDFAVYYCQQYDRSPLTFGCGTKVEIK

SEQ ID NO: 1127 - protein, 496 aa, Artificial Sequence
  Synthetic
QVQLQESGPGLVKPSETLSLTCTVSGGSISSYYWSWIRQPPGKGLEWIGYVYYSGTTNYNPSLKSRVTISVDTSKNQFSLKLSSVTAADTAVYYCASIAVTGFYFDYWGQGTLVTVSSGGGGSGGGGSGGGGSEIVLTQSPGTLSLSPGERVTLSCRASQRVNNNYLAWYQQRPGQAPRLLIYGASSRATGIPDRFSGSGSGTDFTLTISRLEPEDFAVYYCQQYDRSPLTFGGGTKLEIKSGGGGSEVQLVESGGGLVQPGGSLKLSCAASGFTFNKYAMNWVRQAPGKGLEWVARIRSKYNNYATYYADSVKDRFTISRDDSKNTAYLQMNNLKTEDTAVYYCVRHGNFGNSYISYWAYWGQGTLVTVSSGGGGSGGGGSGGGGSQTVVTQEPSLTVSPGGTVTLTCGSSTGAVTSGNYPNWVQQKPGQAPRGLIGGTKFLAPGTPARFSGSLLGGKAALTLSGVQPEDEAEYYCVLWYSNRWVFGGGTKLTVL

SEQ ID NO: 1128 - protein, 496 aa, Artificial Sequence
  Synthetic
QVQLQESGPGLVKPSETLSLTCTVSGGSISSYYWSWIRQPPGKGLEWIGYIYYSGRTNYYPSLKSRVTISIDTSKNQFSLKLSSVTAADTAVYYCARIAVAGFFFDYWGQGTLVTVSSGGGGSGGGGSGGGGSEIVLTQSPGTLSLSPGERATLSCRASQSVNKNYLAWYQQKPGQAPRLLIYGASSRATGIPDRFSGSGSGTDFTLTISRLEPEDFAVYYCQQYDRSPLTFGGGTKLEIKSGGGGSEVQLVESGGGLVQPGGSLKLSCAASGFTFNKYAMNWVRQAPGKGLEWVARIRSKYNNYATYYADSVKDRFTISRDDSKNTAYLQMNNLKTEDTAVYYCVRHGNFGNSYISYWAYWGQGTLVTVSSGGGGSGGGGSGGGGSQTVVTQEPSLTVSPGGTVTLTCGSSTGAVTSGNYPNWVQQKPGQAPRGLIGGTKFLAPGTPARFSGSLLGGKAALTLSGVQPEDEAEYYCVLWYSNRWVFGGGTKLTVL

SEQ ID NO: 1129 - protein, 496 aa, Artificial Sequence
  Synthetic
QVQLQESGPGLVKPSETLSLTCTVSGASISSFYWSWIRQPPGKGLEWIGYIYYSGTTNYNPSLKSRVTISVDTSKNQFSLKLSSVTAADTAVYYCARIAVAGFFFDYWGQGTLVTVSSGGGGSGGGGSGGGGSEIVLTQSPGTLSLSPGERATLSCRASQSVNKNYLAWYQQKPGQAPRLLIYGASSRATGIPDRFSGSGSGTDFTLTISRLEPEDFAVYYCQQYDRSPLTFGGGTKVEIKSGGGGSEVQLVESGGGLVQPGGSLKLSCAASGFTFNKYAMNWVRQAPGKGLEWVARIRSKYNNYATYYADSVKDRFTISRDDSKNTAYLQMNNLKTEDTAVYYCVRHGNFGNSYISYWAYWGQGTLVTVSSGGGGSGGGGSGGGGSQTVVTQEPSLTVSPGGTVTLTCGSSTGAVTSGNYPNWVQQKPGQAPRGLIGGTKFLAPGTPARFSGSLLGGKAALTLSGVQPEDEAEYYCVLWYSNRWVFGGGTKLTVL

SEQ ID NO: 1130 - protein, 496 aa, Artificial Sequence
  Synthetic
QVQLQESGPGLVKPSQTLSLTCTVSGASISSFYWSWIRQPPGKGLEWIGYIYYSGTTNYNPSLKSRVTISVDTSKNQFSLKLSSVTAADTAVYYCARIAVAGFFFDYWGQGTLVTVSSGGGGSGGGGSGGGGSEIVLTQSPGTLSLSPGERATLSCRASQSVNKNYLAWYQQKPGQAPRLLIYGASSRATGIPDRFSGSGSGTDFTLTISRLEPEDFAVYYCQQYDRSPLTFGGGTKVEIKSGGGGSEVQLVESGGGLVQPGGSLKLSCAASGFTFNKYAMNWVRQAPGKGLEWVARIRSKYNNYATYYADSVKDRFTISRDDSKNTAYLQMNNLKTEDTAVYYCVRHGNFGNSYISYWAYWGQGTLVTVSSGGGGSGGGGSGGGGSQTVVTQEPSLTVSPGGTVTLTCGSSTGAVTSGNYPNWVQQKPGQAPRGLIGGTKFLAPGTPARFSGSLLGGKAALTLSGVQPEDEAEYYCVLWYSNRWVFGGGTKLTVL

SEQ ID NO: 1131 - protein, 496 aa, Artificial Sequence
  Synthetic
QVQLQEWGPGLVKPSETLSLTCTVSGASISSFYWSWIRQPPGKGLEWIGYIYYSGTTNYNPSLKSRVTISVDTSKNQLSLKLSSVTAADTAVYYCARIAVAGFFFDYWGQGTLVTVSSGGGGSGGGGSGGGGSEIVLTQSPGTLSLSPGERATLSCRASQSVNKNYLAWYQQKPGQAPRLLIYGASSRATGIPDRFSGSGSGTDFTLTISRLEPEDFAVYYCQQYDRSPLTFGGGTKVDIKSGGGGSEVQLVESGGGLVQPGGSLKLSCAASGFTFNKYAMNWVRQAPGKGLEWVARIRSKYNNYATYYADSVKDRFTISRDDSKNTAYLQMNNLKTEDTAVYYCVRHGNFGNSYISYWAYWGQGTLVTVSSGGGGSGGGGSGGGGSQTVVTQEPSLTVSPGGTVTLTCGSSTGAVTSGNYPNWVQQKPGQAPRGLIGGTKFLAPGTPARFSGSLLGGKAALTLSGVQPEDEAEYYCVLWYSNRWVFGGGTKLTVL

SEQ ID NO: 1132 - protein, 496 aa, Artificial Sequence
  Synthetic
QVQLQESGPGLVKPSETLSLTCTVSGASISSFYWSWIRQPPGKGLEWIGYIYYSGTTNYNPSLKSRVTISVDTSKNQFSLKLSSVTAADTAVYYCARIAVAGFFFDYWGQGTLVTVSSGGGGSGGGGSGGGGSEIVLTQSPGTLSLSPGESATLSCRASQSVNKNYLAWYQQKPGQAPRLLIYGASSRATGIPDRFSGSGSGTDFTLTISRLEPEDFAVYYCQQYDRSPLTFGGGTRLEIKSGGGGSEVQLVESGGGLVQPGGSLKLSCAASGFTFNKYAMNWVRQAPGKGLEWVARIRSKYNNYATYYADSVKDRFTISRDDSKNTAYLQMNNLKTEDTAVYYCVRHGNFGNSYISYWAYWGQGTLVTVSSGGGGSGGGGSGGGGSQTVVTQEPSLTVSPGGTVTLTCGSSTGAVTSGNYPNWVQQKPGQAPRGLIGGTKFLAPGTPARFSGSLLGGKAALTLSGVQPEDEAEYYCVLWYSNRWVFGGGTKLTVL

SEQ ID NO: 1133 - protein, 496 aa, Artificial Sequence
  Synthetic
QVQLQESGPGLVKPSQTLSLTCTVSGGSISSYYWSWIRQPPGKGLEWIGYIFYNGITNYNPSLKSRVTISLDTSKNQFSLKLSSVTAADTAKYYCARIHSGSFSFDYWDQGTLVTVSSGGGGSGGGGSGGGGSEIVMTQSPGTLSLSPGERATLSCRASQSVSRGYLAWYQQKPGQAPRLLIYGASSRATDIPDRFSGSGSGTDFTLTISRLEPEDFAVYYCQQYDTSPITFGQGTKVEIKSGGGGSEVQLVESGGGLVQPGGSLKLSCAASGFTFNKYAMNWVRQAPGKGLEWVARIRSKYNNYATYYADSVKDRFTISRDDSKNTAYLQMNNLKTEDTAVYYCVRHGNFGNSYISYWAYWGQGTLVTVSSGGGGSGGGGSGGGGSQTVVTQEPSLTVSPGGTVTLTCGSSTGAVTSGNYPNWVQQKPGQAPRGLIGGTKFLAPGTPARFSGSLLGGKAALTLSGVQPEDEAEYYCVLWYSNRWVFGGGTKLTVL

SEQ ID NO: 1134 - protein, 503 aa, Artificial Sequence
  Synthetic
EVQLVESGGGLVKPGGSLRLSCAASGFIFNNAGMSWVRQAPGKGLEWVGRIKNKIDGGTTDFAAPVKGRFTISRDDSKNTLYLQMNSLKAEDTAVYYCTARGWYGDYFDYWGQGTLVTVSSGGGGSGGGGSGGGGSDIVMTQTPLSLPVTPGEPASISCRSSQSLLHSNGYNYLDWYLQKPGQSPQLLIYLGSNRASGVPDRFSGSGSGTDFTLKISRVEAEDVGIYYCMQALQTPFTFGPGTKVEIKSGGGGSEVQLVESGGGLVQPGGSLKLSCAASGFTFNKYAMNWVRQAPGKGLEWVARIRSKYNNYATYYADSVKDRFTISRDDSKNTAYLQMNNLKTEDTAVYYCVRHGNFGNSYISYWAYWGQGTLVTVSSGGGGSGGGGSGGGGSQTVVTQEPSLTVSPGGTVTLTCGSSTGAVTSGNYPNWVQQKPGQAPRGLIGGTKFLAPGTPARFSGSLLGGKAALTLSGVQPEDEAEYYCVLWYSNRWVFGGGTKLTVL

SEQ ID NO: 1135 - protein, 504 aa, Artificial Sequence
  Synthetic
QVQLVESGGGVVQPGRSLRLSCAASGFSFSSYDIHWVRQAPGKGLEWVAVISSHGSNKNYARSVKGRFTISRDNSKNTLYLQMNSLKAEDTAVYYCARDGYSGNDPFYYYYHGMDVWGQGTTVTVSSGGGGSGGGGSGGGGSDIQMTQSPSSLSASVGDRVTITCRASQSISSYLNWYQQKPGKAPKLLIYAASSLQSGVPSRFSGSGSGTDFSLTISSLQPEDFATYYCQQSFTTPLTFGGGTKVEIKSGGGGSEVQLVESGGGLVQPGGSLKLSCAASGFTFNKYAMNWVRQAPGKGLEWVARIRSKYNNYATYYADSVKDRFTISRDDSKNTAYLQMNNLKTEDTAVYYCVRHGNFGNSYISYWAYWGQGTLVTVSSGGGGSGGGGSGGGGSQTVVTQEPSLTVSPGGTVTLTCGSSTGAVTSGNYPNWVQQKPGQAPRGLIGGTKFLAPGTPARFSGSLLGGKAALTLSGVQPEDEAEYYCVLWYSNRWVFGGGTKLTVL

SEQ ID NO: 1136 - protein, 496 aa, Artificial Sequence
  Synthetic
QVQLQESGPGLVKPSETLSLTCTVSGGSISSYYWSWIRQPPGKGLEWIGYVYYSGTTNYNPSLKSRVTISVDTSKNQFSLKLSSVTAADTAVYYCASIAVTGFYFDYWGQGTLVTVSSGGGGSGGGGSGGGGSEIVLTQSPGTLSLSPGERVTLSCRASQRVNNNYLAWYQQRPGQAPRLLIYGASSRATGIPDRFSGSGSGTDFTLTISRLEPEDFAVYYCQQYDRSPLTFGGGTKLEIKSGGGGSEVQLVESGGGLVQPGGSLRLSCAASGFTFNSYAMNWVRQAPGKGLEWVARIRSKYNNYATYYADSVKGRFTISRDDSKNTAYLQMNSLKTEDTAVYYCVRHGNFGNSYVSWWAYWGQGTLVTVSSGGGGSGGGGSGGGGSQTVVTQEPSLTVSPGGTVTLTCGSSTGAVTSGNYPNWVQQKPGQAPRGLIGGTKFLAPGTPARFSGSLLGGKAALTLSGVQPEDEAEYYCVLWYSNRWVFGGGTKLTVL

SEQ ID NO: 1137 - protein, 496 aa, Artificial Sequence
  Synthetic
QVQLQESGPGLVKPSETLSLTCTVSGGSISSYYWSWIRQPPGKGLEWIGYIYYSGRTNYYPSLKSRVTISIDTSKNQFSLKLSSVTAADTAVYYCARIAVAGFFFDYWGQGTLVTVSSGGGGSGGGGSGGGGSEIVLTQSPGTLSLSPGERATLSCRASQSVNKNYLAWYQQKPGQAPRLLIYGASSRATGIPDRFSGSGSGTDFTLTISRLEPEDFAVYYCQQYDRSPLTFGGGTKLEIKSGGGGSEVQLVESGGGLVQPGGSLRLSCAASGFTFNSYAMNWVRQAPGKGLEWVARIRSKYNNYATYYADSVKGRFTISRDDSKNTAYLQMNSLKTEDTAVYYCVRHGNFGNSYVSWWAYWGQGTLVTVSSGGGGSGGGGSGGGGSQTVVTQEPSLTVSPGGTVTLTCGSSTGAVTSGNYPNWVQQKPGQAPRGLIGGTKFLAPGTPARFSGSLLGGKAALTLSGVQPEDEAEYYCVLWYSNRWVFGGGTKLTVL

SEQ ID NO: 1138 - protein, 496 aa, Artificial Sequence
  Synthetic
QVQLQESGPGLVKPSETLSLTCTVSGASISSFYWSWIRQPPGKGLEWIGYIYYSGTTNYNPSLKSRVTISVDTSKNQFSLKLSSVTAADTAVYYCARIAVAGFFFDYWGQGTLVTVSSGGGGSGGGGSGGGGSEIVLTQSPGTLSLSPGERATLSCRASQSVNKNYLAWYQQKPGQAPRLLIYGASSRATGIPDRFSGSGSGTDFTLTISRLEPEDFAVYYCQQYDRSPLTFGGGTKVEIKSGGGGSEVQLVESGGGLVQPGGSLRLSCAASGFTFNSYAMNWVRQAPGKGLEWVARIRSKYNNYATYYADSVKGRFTISRDDSKNTAYLQMNSLKTEDTAVYYCVRHGNFGNSYVSWWAYWGQGTLVTVSSGGGGSGGGGSGGGGSQTVVTQEPSLTVSPGGTVTLTCGSSTGAVTSGNYPNWVQQKPGQAPRGLIGGTKFLAPGTPARFSGSLLGGKAALTLSGVQPEDEAEYYCVLWYSNRWVFGGGTKLTVL

SEQ ID NO: 1139 - protein, 496 aa, Artificial Sequence
  Synthetic
QVQLQESGPGLVKPSQTLSLTCTVSGASISSFYWSWIRQPPGKGLEWIGYIYYSGTTNYNPSLKSRVTISVDTSKNQFSLKLSSVTAADTAVYYCARIAVAGFFFDYWGQGTLVTVSSGGGGSGGGGSGGGGSEIVLTQSPGTLSLSPGERATLSCRASQSVNKNYLAWYQQKPGQAPRLLIYGASSRATGIPDRFSGSGSGTDFTLTISRLEPEDFAVYYCQQYDRSPLTFGGGTKVEIKSGGGGSEVQLVESGGGLVQPGGSLRLSCAASGFTFNSYAMNWVRQAPGKGLEWVARIRSKYNNYATYYADSVKGRFTISRDDSKNTAYLQMNSLKTEDTAVYYCVRHGNFGNSYVSWWAYWGQGTLVTVSSGGGGSGGGGSGGGGSQTVVTQEPSLTVSPGGTVTLTCGSSTGAVTSGNYPNWVQQKPGQAPRGLIGGTKFLAPGTPARFSGSLLGGKAALTLSGVQPEDEAEYYCVLWYSNRWVFGGGTKLTVL

SEQ ID NO: 1140 - protein, 496 aa, Artificial Sequence
  Synthetic
QVQLQEWGPGLVKPSETLSLTCTVSGASISSFYWSWIRQPPGKGLEWIGYIYYSGTTNYNPSLKSRVTISVDTSKNQLSLKLSSVTAADTAVYYCARIAVAGFFFDYWGQGTLVTVSSGGGGSGGGGSGGGGSEIVLTQSPGTLSLSPGERATLSCRASQSVNKNYLAWYQQKPGQAPRLLIYGASSRATGIPDRFSGSGSGTDFTLTISRLEPEDFAVYYCQQYDRSPLTFGGGTKVDIKSGGGGSEVQLVESGGGLVQPGGSLRLSCAASGFTFNSYAMNWVRQAPGKGLEWVARIRSKYNNYATYYADSVKGRFTISRDDSKNTAYLQMNSLKTEDTAVYYCVRHGNFGNSYVSWWAYWGQGTLVTVSSGGGGSGGGGSGGGGSQTVVTQEPSLTVSPGGTVTLTCGSSTGAVTSGNYPNWVQQKPGQAPRGLIGGTKFLAPGTPARFSGSLLGGKAALTLSGVQPEDEAEYYCVLWYSNRWVFGGGTKLTVL

SEQ ID NO: 1141 - protein, 496 aa, Artificial Sequence
  Synthetic
QVQLQESGPGLVKPSETLSLTCTVSGASISSFYWSWIRQPPGKGLEWIGYIYYSGTTNYNPSLKSRVTISVDTSKNQFSLKLSSVTAADTAVYYCARIAVAGFFFDYWGQGTLVTVSSGGGGSGGGGSGGGGSEIVLTQSPGTLSLSPGESATLSCRASQSVNKNYLAWYQQKPGQAPRLLIYGASSRATGIPDRFSGSGSGTDFTLTISRLEPEDFAVYYCQQYDRSPLTFGGGTRLEIKSGGGGSEVQLVESGGGLVQPGGSLRLSCAASGFTFNSYAMNWVRQAPGKGLEWVARIRSKYNNYATYYADSVKGRFTISRDDSKNTAYLQMNSLKTEDTAVYYCVRHGNFGNSYVSWWAYWGQGTLVTVSSGGGGSGGGGSGGGGSQTVVTQEPSLTVSPGGTVTLTCGSSTGAVTSGNYPNWVQQKPGQAPRGLIGGTKFLAPGTPARFSGSLLGGKAALTLSGVQPEDEAEYYCVLWYSNRWVFGGGTKLTVL

SEQ ID NO: 1142 - protein, 496 aa, Artificial Sequence
  Synthetic
QVQLQESGPGLVKPSQTLSLTCTVSGGSISSYYWSWIRQPPGKGLEWIGYIFYNGITNYNPSLKSRVTISLDTSKNQFSLKLSSVTAADTAKYYCARIHSGSFSFDYWDQGTLVTVSSGGGGSGGGGSGGGGSEIVMTQSPGTLSLSPGERATLSCRASQSVSRGYLAWYQQKPGQAPRLLIYGASSRATDIPDRFSGSGSGTDFTLTISRLEPEDFAVYYCQQYDTSPITFGQGTKVEIKSGGGGSEVQLVESGGGLVQPGGSLRLSCAASGFTFNSYAMNWVRQAPGKGLEWVARIRSKYNNYATYYADSVKGRFTISRDDSKNTAYLQMNSLKTEDTAVYYCVRHGNFGNSYVSWWAYWGQGTLVTVSSGGGGSGGGGSGGGGSQTVVTQEPSLTVSPGGTVTLTCGSSTGAVTSGNYPNWVQQKPGQAPRGLIGGTKFLAPGTPARFSGSLLGGKAALTLSGVQPEDEAEYYCVLWYSNRWVFGGGTKLTVL

SEQ ID NO: 1143 - protein, 496 aa, Artificial Sequence
  Synthetic
QVQLQESGPGLVKPSETLSLTCTVSGGSISSYYWSWIRQPPGKCLEWIGYVYYSGTTNYNPSLKSRVTISVDTSKNQFSLKLSSVTAADTAVYYCASIAVTGFYFDYWGQGTLVTVSSGGGGSGGGGSGGGGSEIVLTQSPGTLSLSPGERVTLSCRASQRVNNNYLAWYQQRPGQAPRLLIYGASSRATGIPDRFSGSGSGTDFTLTISRLEPEDFAVYYCQQYDRSPLTFGCGTKLEIKSGGGGSEVQLVESGGGLVQPGGSLKLSCAASGFTFNKYAMNWVRQAPGKGLEWVARIRSKYNNYATYYADSVKDRFTISRDDSKNTAYLQMNNLKTEDTAVYYCVRHGNFGNSYISYWAYWGQGTLVTVSSGGGGSGGGGSGGGGSQTVVTQEPSLTVSPGGTVTLTCGSSTGAVTSGNYPNWVQQKPGQAPRGLIGGTKFLAPGTPARFSGSLLGGKAALTLSGVQPEDEAEYYCVLWYSNRWVFGGGTKLTVL

SEQ ID NO: 1144 - protein, 496 aa, Artificial Sequence
  Synthetic
QVQLQESGPGLVKPSETLSLTCTVSGASISSFYWSWIRQPPGKCLEWIGYIYYSGTTNYNPSLKSRVTISVDTSKNQFSLKLSSVTAADTAVYYCARIAVAGFFFDYWGQGTLVTVSSGGGGSGGGGSGGGGSEIVLTQSPGTLSLSPGERATLSCRASQSVNKNYLAWYQQKPGQAPRLLIYGASSRATGIPDRFSGSGSGTDFTLTISRLEPEDFAVYYCQQYDRSPLTFGCGTKVEIKSGGGGSEVQLVESGGGLVQPGGSLKLSCAASGFTFNKYAMNWVRQAPGKGLEWVARIRSKYNNYATYYADSVKDRFTISRDDSKNTAYLQMNNLKTEDTAVYYCVRHGNFGNSYISYWAYWGQGTLVTVSSGGGGSGGGGSGGGGSQTVVTQEPSLTVSPGGTVTLTCGSSTGAVTSGNYPNWVQQKPGQAPRGLIGGTKFLAPGTPARFSGSLLGGKAALTLSGVQPEDEAEYYCVLWYSNRWVFGGGTKLTVL

SEQ ID NO: 1145 - protein, 37 aa, Artificial Sequence
  Synthetic
RVDRCSLQPCRNGGLCLDLGHALRCRCRAGFAGPRCE

SEQ ID NO: 1146 - protein, 5 aa, Artificial Sequence
  Synthetic
SYYMH

SEQ ID NO: 1147 - protein, 17 aa, Artificial Sequence
  Synthetic
IINPSDGSTNYAQNFQG

SEQ ID NO: 1148 - protein, 14 aa, Artificial Sequence
  Synthetic
GGNSAFYSYYDMDV

SEQ ID NO: 1149 - protein, 16 aa, Artificial Sequence
  Synthetic
RSSQSLVYRDGNTYLS

SEQ ID NO: 1150 - protein, 7 aa, Artificial Sequence
  Synthetic
KVSNWQS

SEQ ID NO: 1151 - protein, 9 aa, Artificial Sequence
  Synthetic
MQGTHWPPT

SEQ ID NO: 1152 - protein, 5 aa, Artificial Sequence
  Synthetic
NYYMH

SEQ ID NO: 1153 - protein, 17 aa, Artificial Sequence
  Synthetic
IINPSDGSTSYAQKFQG

SEQ ID NO: 1154 - protein, 14 aa, Artificial Sequence
  Synthetic
GGNSAFYSYYDMDV

SEQ ID NO: 1155 - protein, 16 aa, Artificial Sequence
  Synthetic
RSSQSLVYRDGNTYLS

SEQ ID NO: 1156 - protein, 7 aa, Artificial Sequence
  Synthetic
KVSNWQS

SEQ ID NO: 1157 - protein, 9 aa, Artificial Sequence
  Synthetic
MQGTHWPPT

SEQ ID NO: 1158 - protein, 5 aa, Artificial Sequence
  Synthetic
GYYIH

SEQ ID NO: 1159 - protein, 17 aa, Artificial Sequence
  Synthetic
IINPSDGSTSYGQNFQG

SEQ ID NO: 1160 - protein, 14 aa, Artificial Sequence
  Synthetic
GGNSAFYSYYDMDV

SEQ ID NO: 1161 - protein, 16 aa, Artificial Sequence
  Synthetic
RSSQSLAYRDGNTYLS

SEQ ID NO: 1162 - protein, 7 aa, Artificial Sequence
  Synthetic
KVSNWQS

SEQ ID NO: 1163 - protein, 9 aa, Artificial Sequence
  Synthetic
MQGTHWPPT

SEQ ID NO: 1164 - protein, 5 aa, Artificial Sequence
  Synthetic
GHYMH

SEQ ID NO: 1165 - protein, 17 aa, Artificial Sequence
  Synthetic
IINPSDGSTNYAQKFQG

SEQ ID NO: 1166 - protein, 14 aa, Artificial Sequence
  Synthetic
GTTVVHYSYYDMDV

SEQ ID NO: 1167 - protein, 16 aa, Artificial Sequence
  Synthetic
RSSQSLVYRDGNTYLT

SEQ ID NO: 1168 - protein, 7 aa, Artificial Sequence
  Synthetic
KVSNWQS

SEQ ID NO: 1169 - protein, 9 aa, Artificial Sequence
  Synthetic
MQGTHWPPT

SEQ ID NO: 1170 - protein, 5 aa, Artificial Sequence
  Synthetic
NYFMH

SEQ ID NO: 1171 - protein, 17 aa, Artificial Sequence
  Synthetic
IINPSDGSTSYAQNFQG

SEQ ID NO: 1172 - protein, 14 aa, Artificial Sequence
  Synthetic
GGNSAFYSYYDMDV

SEQ ID NO: 1173 - protein, 16 aa, Artificial Sequence
  Synthetic
RSSQSLVYRDGNTYLS

SEQ ID NO: 1174 - protein, 7 aa, Artificial Sequence
  Synthetic
RVSNWQS

SEQ ID NO: 1175 - protein, 9 aa, Artificial Sequence
  Synthetic
MQGTYWPPT

SEQ ID NO: 1176 - protein, 17 aa, Artificial Sequence
  Synthetic
IINPSEGSTSYAQKFQG

SEQ ID NO: 1177 - protein, 17 aa, Artificial Sequence
  Synthetic
IINPSDASTSYAQKFQG

SEQ ID NO: 1178 - protein, 16 aa, Artificial Sequence
  Synthetic
RSSQSLVYREGNTYLS

SEQ ID NO: 1179 - protein, 16 aa, Artificial Sequence
  Synthetic
RSSQSLVYRDANTYLS

SEQ ID NO: 1180 - protein, 16 aa, Artificial Sequence
  Synthetic
RSSQSLVYRDGQTYLS

SEQ ID NO: 1181 - protein, 16 aa, Artificial Sequence
  Synthetic
RSSQSLVYRDGNAYLS

SEQ ID NO: 1182 - protein, 123 aa, Artificial Sequence
  Synthetic
QVQLVQSGAEVKKPGASVKVSCKASGYTFTSYYMHWVRQAPGQGLEWMGIINPSDGSTNYAQNFQGRVTMTRDTSTNTVYMELSSLRSEDTAVYYCARGGNSAFYSYYDMDVWGQGTTVTVSS

SEQ ID NO: 1183 - protein, 123 aa, Artificial Sequence
  Synthetic
QVQLVQSGAEVKKPGASVKVSCKASGYTFTNYYMHWVRQAPGLGLEWMGIINPSDGSTSYAQKFQGRVTMTRDTSTNTVYMDLSSLRSEDTAVYYCARGGNSAFYSYYDMDVWGQGTTVTVSS

SEQ ID NO: 1184 - protein, 123 aa, Artificial Sequence
  Synthetic
QVQLVQSGAEVKKPGASVKVSCKASGYTFTGYYIHWVRQAPGQGLEWMGIINPSDGSTSYGQNFQGRVTMTRDTSTNTVYMELSSLRSEDTAVYYCARGGNSAFYSYYDMDVWGQGTTVTVSS

SEQ ID NO: 1185 - protein, 123 aa, Artificial Sequence
  Synthetic
QVQLVQSGAEVKKPGASVKVSCKASGYTFTGHYMHWVRQAPGQGLEWMGIINPSDGSTNYAQKFQGRVTMTRDTSTSTVYMELRSLRSEDTAVYYCTRGTTVVHYSYYDMDVWGQGTTVTVSS

SEQ ID NO: 1186 - protein, 123 aa, Artificial Sequence
  Synthetic
QVQLVQSGAEVKKPGASVKVSCKASGYTFTNYFMHWVRQAPGLGLEWMGIINPSDGSTSYAQNFQGRVTMTRDTSTNTVYMELSSLRSEDTAVYYCARGGNSAFYSYYDMDVWGQGTTVTVSS

SEQ ID NO: 1187 - protein, 123 aa, Artificial Sequence
  Synthetic
QVQLVQSGAEVKKPGASVKVSCKASGYTFTNYYMHWVRQAPGQGLEWMGIINPSDGSTSYAQKFQGRVTMTRDTSTNTVYMDLSSLRSEDTAVYYCARGGNSAFYSYYDMDVWGQGTTVTVSS

SEQ ID NO: 1188 - protein, 123 aa, Artificial Sequence
  Synthetic
QVQLVQSGAEVKKPGASVKVSCKASGYTFTNYYMHWVRQAPGLGLEWMGIINPSEGSTSYAQKFQGRVTMTRDTSTNTVYMDLSSLRSEDTAVYYCARGGNSAFYSYYDMDVWGQGTTVTVSS

SEQ ID NO: 1189 - protein, 123 aa, Artificial Sequence
  Synthetic
QVQLVQSGAEVKKPGASVKVSCKASGYTFTNYYMHWVRQAPGLGLEWMGIINPSDASTSYAQKFQGRVTMTRDTSTNTVYMDLSSLRSEDTAVYYCARGGNSAFYSYYDMDVWGQGTTVTVSS

SEQ ID NO: 1190 - protein, 123 aa, Artificial Sequence
  Synthetic
QVQLVQSGAEVKKPGASVKVSCKASGYTFTNYYMHWVRQAPGQGLEWMGIINPSEGSTSYAQKFQGRVTMTRDTSTNTVYMDLSSLRSEDTAVYYCARGGNSAFYSYYDMDVWGQGTTVTVSS

SEQ ID NO: 1191 - protein, 122 aa, Artificial Sequence
  Synthetic
QVQLVQSGAEVKKPGASVKVSCKASGYTFTNYYMHWVRQAPGQGLEWMGIINPSDASTSYAQKFQGRVTMTRDTSTNTVYMDLSSLRSEDTAVYYCARGGNSAFYSYYDMDVWGQGTTVTVS

SEQ ID NO: 1192 - protein, 123 aa, Artificial Sequence
  Synthetic
QVQLVQSGAEVKKPGASVKVSCKASGYTFTNYYMHWVRQAPGLCLEWMGIINPSDGSTSYAQKFQGRVTMTRDTSTNTVYMDLSSLRSEDTAVYYCARGGNSAFYSYYDMDVWGQGTTVTVSS

SEQ ID NO: 1193 - protein, 123 aa, Artificial Sequence
  Synthetic
QVQLVQSGAEVKKPGASVKVSCKASGYTFTNYYMHWVRQAPGQCLEWMGIINPSDGSTSYAQKFQGRVTMTRDTSTNTVYMDLSSLRSEDTAVYYCARGGNSAFYSYYDMDVWGQGTTVTVSS

SEQ ID NO: 1194 - protein, 123 aa, Artificial Sequence
  Synthetic
QVQLVQSGAEVKKPGASVKVSCKASGYTFTNYYMHWVRQAPGLCLEWMGIINPSEGSTSYAQKFQGRVTMTRDTSTNTVYMDLSSLRSEDTAVYYCARGGNSAFYSYYDMDVWGQGTTVTVSS

SEQ ID NO: 1195 - protein, 123 aa, Artificial Sequence
  Synthetic
QVQLVQSGAEVKKPGASVKVSCKASGYTFTNYYMHWVRQAPGLCLEWMGIINPSDASTSYAQKFQGRVTMTRDTSTNTVYMDLSSLRSEDTAVYYCARGGNSAFYSYYDMDVWGQGTTVTVSS

SEQ ID NO: 1196 - protein, 123 aa, Artificial Sequence
  Synthetic
QVQLVQSGAEVKKPGASVKVSCKASGYTFTNYYMHWVRQAPGQCLEWMGIINPSEGSTSYAQKFQGRVTMTRDTSTNTVYMDLSSLRSEDTAVYYCARGGNSAFYSYYDMDVWGQGTTVTVSS

SEQ ID NO: 1197 - protein, 123 aa, Artificial Sequence
  Synthetic
QVQLVQSGAEVKKPGASVKVSCKASGYTFTNYYMHWVRQAPGQCLEWMGIINPSDASTSYAQKFQGRVTMTRDTSTNTVYMDLSSLRSEDTAVYYCARGGNSAFYSYYDMDVWGQGTTVTVSS

SEQ ID NO: 1198 - protein, 112 aa, Artificial Sequence
  Synthetic
DVVMTQSPLSLPVTLGQPASISCRSSQSLVYRDGNTYLSWFQQRPGQSPRRLIYKVSNWQSGVPDRFSGSGSGTDFTLKISRVEAEDVGVYFCMQGTHWPPTFGQGTKVEIK

SEQ ID NO: 1199 - protein, 112 aa, Artificial Sequence
  Synthetic
DVVMTQTPLSLPVTLGQPASISCRSSQSLVYRDGNTYLSWFQQRPGQSPRRLIYKVSNWQSGVPDRFSGGGSGTDFTLKISRVEAEDVGVYYCMQGTHWPPTFGQGTKVEIK

SEQ ID NO: 1200 - protein, 112 aa, Artificial Sequence
  Synthetic
DVVMTQSPLSLPVTLGQPASISCRSSQSLAYRDGNTYLSWFQQRPGQSPRRLIYKVSNWQSGVPDRFSGSGSGTDFTLKISRVEAEDVGVYFCMQGTHWPPTFGQGTKVEIK

SEQ ID NO: 1201 - protein, 112 aa, Artificial Sequence
  Synthetic
DVVMTQTPLSLPVTLGQPASISCRSSQSLVYRDGNTYLTWFQQRPGQSPRRLIYKVSNWQSGVPDRFSGSGSGTDFTLKISRVEAEDVGVYYCMQGTHWPPTFGGGTKVEIK

SEQ ID NO: 1202 - protein, 112 aa, Artificial Sequence
  Synthetic
DVVMTQSPLSLPVTLGQPASISCRSSQSLVYRDGNTYLSWFQQRPGQSPRRLIYRVSNWQSGVPDRFSGSGSGTDFTLKISRVEAEDVGVYFCMQGTYWPPTFGQGTKVDIK

SEQ ID NO: 1203 - protein, 112 aa, Artificial Sequence
  Synthetic
DVVMTQTPLSLPVTLGQPASISCRSSQSLVYREGNTYLSWFQQRPGQSPRRLIYKVSNWQSGVPDRFSGGGSGTDFTLKISRVEAEDVGVYYCMQGTHWPPTFGQGTKVEIK

SEQ ID NO: 1204 - protein, 112 aa, Artificial Sequence
  Synthetic
DVVMTQTPLSLPVTLGQPASISCRSSQSLVYRDANTYLSWFQQRPGQSPRRLIYKVSNWQSGVPDRFSGGGSGTDFTLKISRVEAEDVGVYYCMQGTHWPPTFGQGTKVEIK

SEQ ID NO: 1205 - protein, 112 aa, Artificial Sequence
  Synthetic
DVVMTQTPLSLPVTLGQPASISCRSSQSLVYRDGQTYLSWFQQRPGQSPRRLIYKVSNWQSGVPDRFSGGGSGTDFTLKISRVEAEDVGVYYCMQGTHWPPTFGQGTKVEIK

SEQ ID NO: 1206 - protein, 112 aa, Artificial Sequence
  Synthetic
DVVMTQTPLSLPVTLGQPASISCRSSQSLVYRDGNAYLSWFQQRPGQSPRRLIYKVSNWQSGVPDRFSGGGSGTDFTLKISRVEAEDVGVYYCMQGTHWPPTFGQGTKVEIK

SEQ ID NO: 1207 - protein, 112 aa, Artificial Sequence
  Synthetic
DVVMTQTPLSLPVTLGQPASISCRSSQSLVYRDGNTYLSWFQQRPGQSPRRLIYKVSNWQSGVPDRFSGSGSGTDFTLKISRVEAEDVGVYYCMQGTHWPPTFGQGTKVEIK

SEQ ID NO: 1208 - protein, 112 aa, Artificial Sequence
  Synthetic
DVVMTQTPLSLPVTLGQPASISCRSSQSLVYREGNTYLSWFQQRPGQSPRRLIYKVSNWQSGVPDRFSGSGSGTDFTLKISRVEAEDVGVYYCMQGTHWPPTFGQGTKVEIK

SEQ ID NO: 1209 - protein, 112 aa, Artificial Sequence
  Synthetic
DVVMTQTPLSLPVTLGQPASISCRSSQSLVYRDANTYLSWFQQRPGQSPRRLIYKVSNWQSGVPDRFSGSGSGTDFTLKISRVEAEDVGVYYCMQGTHWPPTFGQGTKVEIK

SEQ ID NO: 1210 - protein, 112 aa, Artificial Sequence
  Synthetic
DVVMTQTPLSLPVTLGQPASISCRSSQSLVYRDGNTYLSWFQQRPGQSPRRLIYKVSNWQSGVPDRFSGGGSGTDFTLKISRVEAEDVGVYYCMQGTHWPPTFGCGTKVEIK

SEQ ID NO: 1211 - protein, 112 aa, Artificial Sequence
  Synthetic
DVVMTQTPLSLPVTLGQPASISCRSSQSLVYREGNTYLSWFQQRPGQSPRRLIYKVSNWQSGVPDRFSGGGSGTDFTLKISRVEAEDVGVYYCMQGTHWPPTFGCGTKVEIK

SEQ ID NO: 1212 - protein, 112 aa, Artificial Sequence
  Synthetic
DVVMTQTPLSLPVTLGQPASISCRSSQSLVYRDANTYLSWFQQRPGQSPRRLIYKVSNWQSGVPDRFSGGGSGTDFTLKISRVEAEDVGVYYCMQGTHWPPTFGCGTKVEIK

SEQ ID NO: 1213 - protein, 112 aa, Artificial Sequence
  Synthetic
DVVMTQTPLSLPVTLGQPASISCRSSQSLVYRDGQTYLSWFQQRPGQSPRRLIYKVSNWQSGVPDRFSGGGSGTDFTLKISRVEAEDVGVYYCMQGTHWPPTFGCGTKVEIK

SEQ ID NO: 1214 - protein, 112 aa, Artificial Sequence
  Synthetic
DVVMTQTPLSLPVTLGQPASISCRSSQSLVYRDGNAYLSWFQQRPGQSPRRLIYKVSNWQSGVPDRFSGGGSGTDFTLKISRVEAEDVGVYYCMQGTHWPPTFGCGTKVEIK

SEQ ID NO: 1215 - protein, 112 aa, Artificial Sequence
  Synthetic
DVVMTQTPLSLPVTLGQPASISCRSSQSLVYRDGNTYLSWFQQRPGQSPRRLIYKVSNWQSGVPDRFSGSGSGTDFTLKISRVEAEDVGVYYCMQGTHWPPTFGCGTKVEIK

SEQ ID NO: 1216 - protein, 112 aa, Artificial Sequence
  Synthetic
DVVMTQTPLSLPVTLGQPASISCRSSQSLVYREGNTYLSWFQQRPGQSPRRLIYKVSNWQSGVPDRFSGSGSGTDFTLKISRVEAEDVGVYYCMQGTHWPPTFGCGTKVEIK

SEQ ID NO: 1217 - protein, 112 aa, Artificial Sequence
  Synthetic
DVVMTQTPLSLPVTLGQPASISCRSSQSLVYRDANTYLSWFQQRPGQSPRRLIYKVSNWQSGVPDRFSGSGSGTDFTLKISRVEAEDVGVYYCMQGTHWPPTFGCGTKVEIK

SEQ ID NO: 1218 - protein, 250 aa, Artificial Sequence
  Synthetic
QVQLVQSGAEVKKPGASVKVSCKASGYTFTSYYMHWVRQAPGQGLEWMGIINPSDGSTNYAQNFQGRVTMTRDTSTNTVYMELSSLRSEDTAVYYCARGGNSAFYSYYDMDVWGQGTTVTVSSGGGGSGGGGSGGGGSDVVMTQSPLSLPVTLGQPASISCRSSQSLVYRDGNTYLSWFQQRPGQSPRRLIYKVSNWQSGVPDRFSGSGSGTDFTLKISRVEAEDVGVYFCMQGTHWPPTFGQGTKVEIK

SEQ ID NO: 1219 - protein, 250 aa, Artificial Sequence
  Synthetic
QVQLVQSGAEVKKPGASVKVSCKASGYTFTNYYMHWVRQAPGLGLEWMGIINPSDGSTSYAQKFQGRVTMTRDTSTNTVYMDLSSLRSEDTAVYYCARGGNSAFYSYYDMDVWGQGTTVTVSSGGGGSGGGGSGGGGSDVVMTQTPLSLPVTLGQPASISCRSSQSLVYRDGNTYLSWFQQRPGQSPRRLIYKVSNWQSGVPDRFSGGGSGTDFTLKISRVEAEDVGVYYCMQGTHWPPTFGQGTKVEIK

SEQ ID NO: 1220 - protein, 250 aa, Artificial Sequence
  Synthetic
QVQLVQSGAEVKKPGASVKVSCKASGYTFTGYYIHWVRQAPGQGLEWMGIINPSDGSTSYGQNFQGRVTMTRDTSTNTVYMELSSLRSEDTAVYYCARGGNSAFYSYYDMDVWGQGTTVTVSSGGGGSGGGGSGGGGSDVVMTQSPLSLPVTLGQPASISCRSSQSLAYRDGNTYLSWFQQRPGQSPRRLIYKVSNWQSGVPDRFSGSGSGTDFTLKISRVEAEDVGVYFCMQGTHWPPTFGQGTKVEIK

SEQ ID NO: 1221 - protein, 250 aa, Artificial Sequence
  Synthetic
QVQLVQSGAEVKKPGASVKVSCKASGYTFTGHYMHWVRQAPGQGLEWMGIINPSDGSTNYAQKFQGRVTMTRDTSTSTVYMELRSLRSEDTAVYYCTRGTTVVHYSYYDMDVWGQGTTVTVSSGGGGSGGGGSGGGGSDVVMTQTPLSLPVTLGQPASISCRSSQSLVYRDGNTYLTWFQQRPGQSPRRLIYKVSNWQSGVPDRFSGSGSGTDFTLKISRVEAEDVGVYYCMQGTHWPPTFGGGTKVEIK

SEQ ID NO: 1222 - protein, 250 aa, Artificial Sequence
  Synthetic
QVQLVQSGAEVKKPGASVKVSCKASGYTFTNYFMHWVRQAPGLGLEWMGIINPSDGSTSYAQNFQGRVTMTRDTSTNTVYMELSSLRSEDTAVYYCARGGNSAFYSYYDMDVWGQGTTVTVSSGGGGSGGGGSGGGGSDVVMTQSPLSLPVTLGQPASISCRSSQSLVYRDGNTYLSWFQQRPGQSPRRLIYRVSNWQSGVPDRFSGSGSGTDFTLKISRVEAEDVGVYFCMQGTYWPPTFGQGTKVDIK

SEQ ID NO: 1223 - protein, 250 aa, Artificial Sequence
  Synthetic
QVQLVQSGAEVKKPGASVKVSCKASGYTFTNYYMHWVRQAPGLGLEWMGIINPSDGSTSYAQKFQGRVTMTRDTSTNTVYMDLSSLRSEDTAVYYCARGGNSAFYSYYDMDVWGQGTTVTVSSGGGGSGGGGSGGGGSDVVMTQTPLSLPVTLGQPASISCRSSQSLVYREGNTYLSWFQQRPGQSPRRLIYKVSNWQSGVPDRFSGGGSGTDFTLKISRVEAEDVGVYYCMQGTHWPPTFGQGTKVEIK

SEQ ID NO: 1224 - protein, 250 aa, Artificial Sequence
  Synthetic
QVQLVQSGAEVKKPGASVKVSCKASGYTFTNYYMHWVRQAPGLGLEWMGIINPSDGSTSYAQKFQGRVTMTRDTSTNTVYMDLSSLRSEDTAVYYCARGGNSAFYSYYDMDVWGQGTTVTVSSGGGGSGGGGSGGGGSDVVMTQTPLSLPVTLGQPASISCRSSQSLVYRDANTYLSWFQQRPGQSPRRLIYKVSNWQSGVPDRFSGGGSGTDFTLKISRVEAEDVGVYYCMQGTHWPPTFGQGTKVEIK

SEQ ID NO: 1225 - protein, 250 aa, Artificial Sequence
  Synthetic
QVQLVQSGAEVKKPGASVKVSCKASGYTFTNYYMHWVRQAPGLGLEWMGIINPSDGSTSYAQKFQGRVTMTRDTSTNTVYMDLSSLRSEDTAVYYCARGGNSAFYSYYDMDVWGQGTTVTVSSGGGGSGGGGSGGGGSDVVMTQTPLSLPVTLGQPASISCRSSQSLVYRDGQTYLSWFQQRPGQSPRRLIYKVSNWQSGVPDRFSGGGSGTDFTLKISRVEAEDVGVYYCMQGTHWPPTFGQGTKVEIK

SEQ ID NO: 1226 - protein, 250 aa, Artificial Sequence
  Synthetic
QVQLVQSGAEVKKPGASVKVSCKASGYTFTNYYMHWVRQAPGLGLEWMGIINPSDGSTSYAQKFQGRVTMTRDTSTNTVYMDLSSLRSEDTAVYYCARGGNSAFYSYYDMDVWGQGTTVTVSSGGGGSGGGGSGGGGSDVVMTQTPLSLPVTLGQPASISCRSSQSLVYRDGNAYLSWFQQRPGQSPRRLIYKVSNWQSGVPDRFSGGGSGTDFTLKISRVEAEDVGVYYCMQGTHWPPTFGQGTKVEIK

SEQ ID NO: 1227 - protein, 250 aa, Artificial Sequence
  Synthetic
QVQLVQSGAEVKKPGASVKVSCKASGYTFTNYYMHWVRQAPGLGLEWMGIINPSDGSTSYAQKFQGRVTMTRDTSTNTVYMDLSSLRSEDTAVYYCARGGNSAFYSYYDMDVWGQGTTVTVSSGGGGSGGGGSGGGGSDVVMTQTPLSLPVTLGQPASISCRSSQSLVYRDGNTYLSWFQQRPGQSPRRLIYKVSNWQSGVPDRFSGSGSGTDFTLKISRVEAEDVGVYYCMQGTHWPPTFGQGTKVEIK

SEQ ID NO: 1228 - protein, 250 aa, Artificial Sequence
  Synthetic
QVQLVQSGAEVKKPGASVKVSCKASGYTFTNYYMHWVRQAPGQGLEWMGIINPSDGSTSYAQKFQGRVTMTRDTSTNTVYMDLSSLRSEDTAVYYCARGGNSAFYSYYDMDVWGQGTTVTVSSGGGGSGGGGSGGGGSDVVMTQTPLSLPVTLGQPASISCRSSQSLVYRDGNTYLSWFQQRPGQSPRRLIYKVSNWQSGVPDRFSGGGSGTDFTLKISRVEAEDVGVYYCMQGTHWPPTFGQGTKVEIK

SEQ ID NO: 1229 - protein, 250 aa, Artificial Sequence
  Synthetic
QVQLVQSGAEVKKPGASVKVSCKASGYTFTNYYMHWVRQAPGLGLEWMGIINPSEGSTSYAQKFQGRVTMTRDTSTNTVYMDLSSLRSEDTAVYYCARGGNSAFYSYYDMDVWGQGTTVTVSSGGGGSGGGGSGGGGSDVVMTQTPLSLPVTLGQPASISCRSSQSLVYRDGNTYLSWFQQRPGQSPRRLIYKVSNWQSGVPDRFSGGGSGTDFTLKISRVEAEDVGVYYCMQGTHWPPTFGQGTKVEIK

SEQ ID NO: 1230 - protein, 250 aa, Artificial Sequence
  Synthetic
QVQLVQSGAEVKKPGASVKVSCKASGYTFTNYYMHWVRQAPGLGLEWMGIINPSDASTSYAQKFQGRVTMTRDTSTNTVYMDLSSLRSEDTAVYYCARGGNSAFYSYYDMDVWGQGTTVTVSSGGGGSGGGGSGGGGSDVVMTQTPLSLPVTLGQPASISCRSSQSLVYRDGNTYLSWFQQRPGQSPRRLIYKVSNWQSGVPDRFSGGGSGTDFTLKISRVEAEDVGVYYCMQGTHWPPTFGQGTKVEIK

SEQ ID NO: 1231 - protein, 250 aa, Artificial Sequence
  Synthetic
QVQLVQSGAEVKKPGASVKVSCKASGYTFTNYYMHWVRQAPGQGLEWMGIINPSDGSTSYAQKFQGRVTMTRDTSTNTVYMDLSSLRSEDTAVYYCARGGNSAFYSYYDMDVWGQGTTVTVSSGGGGSGGGGSGGGGSDVVMTQTPLSLPVTLGQPASISCRSSQSLVYRDGNTYLSWFQQRPGQSPRRLIYKVSNWQSGVPDRFSGSGSGTDFTLKISRVEAEDVGVYYCMQGTHWPPTFGQGTKVEIK

SEQ ID NO: 1232 - protein, 250 aa, Artificial Sequence
  Synthetic
QVQLVQSGAEVKKPGASVKVSCKASGYTFTNYYMHWVRQAPGQGLEWMGIINPSEGSTSYAQKFQGRVTMTRDTSTNTVYMDLSSLRSEDTAVYYCARGGNSAFYSYYDMDVWGQGTTVTVSSGGGGSGGGGSGGGGSDVVMTQTPLSLPVTLGQPASISCRSSQSLVYREGNTYLSWFQQRPGQSPRRLIYKVSNWQSGVPDRFSGSGSGTDFTLKISRVEAEDVGVYYCMQGTHWPPTFGQGTKVEIK

SEQ ID NO: 1233 - protein, 250 aa, Artificial Sequence
  Synthetic
QVQLVQSGAEVKKPGASVKVSCKASGYTFTNYYMHWVRQAPGQGLEWMGIINPSDASTSYAQKFQGRVTMTRDTSTNTVYMDLSSLRSEDTAVYYCARGGNSAFYSYYDMDVWGQGTTVTVSSGGGGSGGGGSGGGGSDVVMTQTPLSLPVTLGQPASISCRSSQSLVYRDANTYLSWFQQRPGQSPRRLIYKVSNWQSGVPDRFSGSGSGTDFTLKISRVEAEDVGVYYCMQGTHWPPTFGQGTKVEIK

SEQ ID NO: 1234 - protein, 250 aa, Artificial Sequence
  Synthetic
QVQLVQSGAEVKKPGASVKVSCKASGYTFTNYYMHWVRQAPGLCLEWMGIINPSDGSTSYAQKFQGRVTMTRDTSTNTVYMDLSSLRSEDTAVYYCARGGNSAFYSYYDMDVWGQGTTVTVSSGGGGSGGGGSGGGGSDVVMTQTPLSLPVTLGQPASISCRSSQSLVYRDGNTYLSWFQQRPGQSPRRLIYKVSNWQSGVPDRFSGGGSGTDFTLKISRVEAEDVGVYYCMQGTHWPPTFGCGTKVEIK

SEQ ID NO: 1235 - protein, 250 aa, Artificial Sequence
  Synthetic
QVQLVQSGAEVKKPGASVKVSCKASGYTFTNYYMHWVRQAPGLCLEWMGIINPSDGSTSYAQKFQGRVTMTRDTSTNTVYMDLSSLRSEDTAVYYCARGGNSAFYSYYDMDVWGQGTTVTVSSGGGGSGGGGSGGGGSDVVMTQTPLSLPVTLGQPASISCRSSQSLVYREGNTYLSWFQQRPGQSPRRLIYKVSNWQSGVPDRFSGGGSGTDFTLKISRVEAEDVGVYYCMQGTHWPPTFGCGTKVEIK

SEQ ID NO: 1236 - protein, 250 aa, Artificial Sequence
  Synthetic
QVQLVQSGAEVKKPGASVKVSCKASGYTFTNYYMHWVRQAPGLCLEWMGIINPSDGSTSYAQKFQGRVTMTRDTSTNTVYMDLSSLRSEDTAVYYCARGGNSAFYSYYDMDVWGQGTTVTVSSGGGGSGGGGSGGGGSDVVMTQTPLSLPVTLGQPASISCRSSQSLVYRDANTYLSWFQQRPGQSPRRLIYKVSNWQSGVPDRFSGGGSGTDFTLKISRVEAEDVGVYYCMQGTHWPPTFGCGTKVEIK

SEQ ID NO: 1237 - protein, 250 aa, Artificial Sequence
  Synthetic
QVQLVQSGAEVKKPGASVKVSCKASGYTFTNYYMHWVRQAPGLCLEWMGIINPSDGSTSYAQKFQGRVTMTRDTSTNTVYMDLSSLRSEDTAVYYCARGGNSAFYSYYDMDVWGQGTTVTVSSGGGGSGGGGSGGGGSDVVMTQTPLSLPVTLGQPASISCRSSQSLVYRDGQTYLSWFQQRPGQSPRRLIYKVSNWQSGVPDRFSGGGSGTDFTLKISRVEAEDVGVYYCMQGTHWPPTFGCGTKVEIK

SEQ ID NO: 1238 - protein, 250 aa, Artificial Sequence
  Synthetic
QVQLVQSGAEVKKPGASVKVSCKASGYTFTNYYMHWVRQAPGLCLEWMGIINPSDGSTSYAQKFQGRVTMTRDTSTNTVYMDLSSLRSEDTAVYYCARGGNSAFYSYYDMDVWGQGTTVTVSSGGGGSGGGGSGGGGSDVVMTQTPLSLPVTLGQPASISCRSSQSLVYRDGNAYLSWFQQRPGQSPRRLIYKVSNWQSGVPDRFSGGGSGTDFTLKISRVEAEDVGVYYCMQGTHWPPTFGCGTKVEIK

SEQ ID NO: 1239 - protein, 250 aa, Artificial Sequence
  Synthetic
QVQLVQSGAEVKKPGASVKVSCKASGYTFTNYYMHWVRQAPGLCLEWMGIINPSDGSTSYAQKFQGRVTMTRDTSTNTVYMDLSSLRSEDTAVYYCARGGNSAFYSYYDMDVWGQGTTVTVSSGGGGSGGGGSGGGGSDVVMTQTPLSLPVTLGQPASISCRSSQSLVYRDGNTYLSWFQQRPGQSPRRLIYKVSNWQSGVPDRFSGSGSGTDFTLKISRVEAEDVGVYYCMQGTHWPPTFGCGTKVEIK

SEQ ID NO: 1240 - protein, 250 aa, Artificial Sequence
  Synthetic
QVQLVQSGAEVKKPGASVKVSCKASGYTFTNYYMHWVRQAPGQCLEWMGIINPSDGSTSYAQKFQGRVTMTRDTSTNTVYMDLSSLRSEDTAVYYCARGGNSAFYSYYDMDVWGQGTTVTVSSGGGGSGGGGSGGGGSDVVMTQTPLSLPVTLGQPASISCRSSQSLVYRDGNTYLSWFQQRPGQSPRRLIYKVSNWQSGVPDRFSGGGSGTDFTLKISRVEAEDVGVYYCMQGTHWPPTFGCGTKVEIK

SEQ ID NO: 1241 - protein, 250 aa, Artificial Sequence
  Synthetic
QVQLVQSGAEVKKPGASVKVSCKASGYTFTNYYMHWVRQAPGLCLEWMGIINPSEGSTSYAQKFQGRVTMTRDTSTNTVYMDLSSLRSEDTAVYYCARGGNSAFYSYYDMDVWGQGTTVTVSSGGGGSGGGGSGGGGSDVVMTQTPLSLPVTLGQPASISCRSSQSLVYRDGNTYLSWFQQRPGQSPRRLIYKVSNWQSGVPDRFSGGGSGTDFTLKISRVEAEDVGVYYCMQGTHWPPTFGCGTKVEIK

SEQ ID NO: 1242 - protein, 250 aa, Artificial Sequence
  Synthetic
QVQLVQSGAEVKKPGASVKVSCKASGYTFTNYYMHWVRQAPGLCLEWMGIINPSDASTSYAQKFQGRVTMTRDTSTNTVYMDLSSLRSEDTAVYYCARGGNSAFYSYYDMDVWGQGTTVTVSSGGGGSGGGGSGGGGSDVVMTQTPLSLPVTLGQPASISCRSSQSLVYRDGNTYLSWFQQRPGQSPRRLIYKVSNWQSGVPDRFSGGGSGTDFTLKISRVEAEDVGVYYCMQGTHWPPTFGCGTKVEIK

SEQ ID NO: 1243 - protein, 250 aa, Artificial Sequence
  Synthetic
QVQLVQSGAEVKKPGASVKVSCKASGYTFTNYYMHWVRQAPGQCLEWMGIINPSDGSTSYAQKFQGRVTMTRDTSTNTVYMDLSSLRSEDTAVYYCARGGNSAFYSYYDMDVWGQGTTVTVSSGGGGSGGGGSGGGGSDVVMTQTPLSLPVTLGQPASISCRSSQSLVYRDGNTYLSWFQQRPGQSPRRLIYKVSNWQSGVPDRFSGSGSGTDFTLKISRVEAEDVGVYYCMQGTHWPPTFGCGTKVEIK

SEQ ID NO: 1244 - protein, 250 aa, Artificial Sequence
  Synthetic
QVQLVQSGAEVKKPGASVKVSCKASGYTFTNYYMHWVRQAPGQCLEWMGIINPSEGSTSYAQKFQGRVTMTRDTSTNTVYMDLSSLRSEDTAVYYCARGGNSAFYSYYDMDVWGQGTTVTVSSGGGGSGGGGSGGGGSDVVMTQTPLSLPVTLGQPASISCRSSQSLVYREGNTYLSWFQQRPGQSPRRLIYKVSNWQSGVPDRFSGSGSGTDFTLKISRVEAEDVGVYYCMQGTHWPPTFGCGTKVEIK

SEQ ID NO: 1245 - protein, 250 aa, Artificial Sequence
  Synthetic
QVQLVQSGAEVKKPGASVKVSCKASGYTFTNYYMHWVRQAPGQCLEWMGIINPSDASTSYAQKFQGRVTMTRDTSTNTVYMDLSSLRSEDTAVYYCARGGNSAFYSYYDMDVWGQGTTVTVSSGGGGSGGGGSGGGGSDVVMTQTPLSLPVTLGQPASISCRSSQSLVYRDANTYLSWFQQRPGQSPRRLIYKVSNWQSGVPDRFSGSGSGTDFTLKISRVEAEDVGVYYCMQGTHWPPTFGCGTKVEIK

SEQ ID NO: 1246 - protein, 505 aa, Artificial Sequence
  Synthetic
QVQLVQSGAEVKKPGASVKVSCKASGYTFTSYYMHWVRQAPGQGLEWMGIINPSDGSTNYAQNFQGRVTMTRDTSTNTVYMELSSLRSEDTAVYYCARGGNSAFYSYYDMDVWGQGTTVTVSSGGGGSGGGGSGGGGSDVVMTQSPLSLPVTLGQPASISCRSSQSLVYRDGNTYLSWFQQRPGQSPRRLIYKVSNWQSGVPDRFSGSGSGTDFTLKISRVEAEDVGVYFCMQGTHWPPTFGQGTKVEIKSGGGGSEVQLVESGGGLVQPGGSLKLSCAASGFTFNKYAMNWVRQAPGKGLEWVARIRSKYNNYATYYADSVKDRFTISRDDSKNTAYLQMNNLKTEDTAVYYCVRHGNFGNSYISYWAYWGQGTLVTVSSGGGGSGGGGSGGGGSQTVVTQEPSLTVSPGGTVTLTCGSSTGAVTSGNYPNWVQQKPGQAPRGLIGGTKFLAPGTPARFSGSLLGGKAALTLSGVQPEDEAEYYCVLWYSNRWVFGGGTKLTVL

SEQ ID NO: 1247 - protein, 505 aa, Artificial Sequence
  Synthetic
QVQLVQSGAEVKKPGASVKVSCKASGYTFTNYYMHWVRQAPGLGLEWMGIINPSDGSTSYAQKFQGRVTMTRDTSTNTVYMDLSSLRSEDTAVYYCARGGNSAFYSYYDMDVWGQGTTVTVSSGGGGSGGGGSGGGGSDVVMTQTPLSLPVTLGQPASISCRSSQSLVYRDGNTYLSWFQQRPGQSPRRLIYKVSNWQSGVPDRFSGGGSGTDFTLKISRVEAEDVGVYYCMQGTHWPPTFGQGTKVEIKSGGGGSEVQLVESGGGLVQPGGSLKLSCAASGFTFNKYAMNWVRQAPGKGLEWVARIRSKYNNYATYYADSVKDRFTISRDDSKNTAYLQMNNLKTEDTAVYYCVRHGNFGNSYISYWAYWGQGTLVTVSSGGGGSGGGGSGGGGSQTVVTQEPSLTVSPGGTVTLTCGSSTGAVTSGNYPNWVQQKPGQAPRGLIGGTKFLAPGTPARFSGSLLGGKAALTLSGVQPEDEAEYYCVLWYSNRWVFGGGTKLTVL

SEQ ID NO: 1248 - protein, 505 aa, Artificial Sequence
  Synthetic
QVQLVQSGAEVKKPGASVKVSCKASGYTFTGYYIHWVRQAPGQGLEWMGIINPSDGSTSYGQNFQGRVTMTRDTSTNTVYMELSSLRSEDTAVYYCARGGNSAFYSYYDMDVWGQGTTVTVSSGGGGSGGGGSGGGGSDVVMTQSPLSLPVTLGQPASISCRSSQSLAYRDGNTYLSWFQQRPGQSPRRLIYKVSNWQSGVPDRFSGSGSGTDFTLKISRVEAEDVGVYFCMQGTHWPPTFGQGTKVEIKSGGGGSEVQLVESGGGLVQPGGSLKLSCAASGFTFNKYAMNWVRQAPGKGLEWVARIRSKYNNYATYYADSVKDRFTISRDDSKNTAYLQMNNLKTEDTAVYYCVRHGNFGNSYISYWAYWGQGTLVTVSSGGGGSGGGGSGGGGSQTVVTQEPSLTVSPGGTVTLTCGSSTGAVTSGNYPNWVQQKPGQAPRGLIGGTKFLAPGTPARFSGSLLGGKAALTLSGVQPEDEAEYYCVLWYSNRWVFGGGTKLTVL

SEQ ID NO: 1249 - protein, 505 aa, Artificial Sequence
  Synthetic
QVQLVQSGAEVKKPGASVKVSCKASGYTFTGHYMHWVRQAPGQGLEWMGIINPSDGSTNYAQKFQGRVTMTRDTSTSTVYMELRSLRSEDTAVYYCTRGTTVVHYSYYDMDVWGQGTTVTVSSGGGGSGGGGSGGGGSDVVMTQTPLSLPVTLGQPASISCRSSQSLVYRDGNTYLTWFQQRPGQSPRRLIYKVSNWQSGVPDRFSGSGSGTDFTLKISRVEAEDVGVYYCMQGTHWPPTFGGGTKVEIKSGGGGSEVQLVESGGGLVQPGGSLKLSCAASGFTFNKYAMNWVRQAPGKGLEWVARIRSKYNNYATYYADSVKDRFTISRDDSKNTAYLQMNNLKTEDTAVYYCVRHGNFGNSYISYWAYWGQGTLVTVSSGGGGSGGGGSGGGGSQTVVTQEPSLTVSPGGTVTLTCGSSTGAVTSGNYPNWVQQKPGQAPRGLIGGTKFLAPGTPARFSGSLLGGKAALTLSGVQPEDEAEYYCVLWYSNRWVFGGGTKLTVL

SEQ ID NO: 1250 - protein, 505 aa, Artificial Sequence
  Synthetic
QVQLVQSGAEVKKPGASVKVSCKASGYTFTNYFMHWVRQAPGLGLEWMGIINPSDGSTSYAQNFQGRVTMTRDTSTNTVYMELSSLRSEDTAVYYCARGGNSAFYSYYDMDVWGQGTTVTVSSGGGGSGGGGSGGGGSDVVMTQSPLSLPVTLGQPASISCRSSQSLVYRDGNTYLSWFQQRPGQSPRRLIYRVSNWQSGVPDRFSGSGSGTDFTLKISRVEAEDVGVYFCMQGTYWPPTFGQGTKVDIKSGGGGSEVQLVESGGGLVQPGGSLKLSCAASGFTFNKYAMNWVRQAPGKGLEWVARIRSKYNNYATYYADSVKDRFTISRDDSKNTAYLQMNNLKTEDTAVYYCVRHGNFGNSYISYWAYWGQGTLVTVSSGGGGSGGGGSGGGGSQTVVTQEPSLTVSPGGTVTLTCGSSTGAVTSGNYPNWVQQKPGQAPRGLIGGTKFLAPGTPARFSGSLLGGKAALTLSGVQPEDEAEYYCVLWYSNRWVFGGGTKLTVL

SEQ ID NO: 1251 - protein, 505 aa, Artificial Sequence
  Synthetic
QVQLVQSGAEVKKPGASVKVSCKASGYTFTSYYMHWVRQAPGQGLEWMGIINPSDGSTNYAQNFQGRVTMTRDTSTNTVYMELSSLRSEDTAVYYCARGGNSAFYSYYDMDVWGQGTTVTVSSGGGGSGGGGSGGGGSDVVMTQSPLSLPVTLGQPASISCRSSQSLVYRDGNTYLSWFQQRPGQSPRRLIYKVSNWQSGVPDRFSGSGSGTDFTLKISRVEAEDVGVYFCMQGTHWPPTFGQGTKVEIKSGGGGSEVQLVESGGGLVQPGGSLRLSCAASGFTFNSYAMNWVRQAPGKGLEWVARIRSKYNNYATYYADSVKGRFTISRDDSKNTAYLQMNSLKTEDTAVYYCVRHGNFGNSYVSWWAYWGQGTLVTVSSGGGGSGGGGSGGGGSQTVVTQEPSLTVSPGGTVTLTCGSSTGAVTSGNYPNWVQQKPGQAPRGLIGGTKFLAPGTPARFSGSLLGGKAALTLSGVQPEDEAEYYCVLWYSNRWVFGGGTKLTVL

SEQ ID NO: 1252 - protein, 505 aa, Artificial Sequence
  Synthetic
QVQLVQSGAEVKKPGASVKVSCKASGYTFTNYYMHWVRQAPGLGLEWMGIINPSDGSTSYAQKFQGRVTMTRDTSTNTVYMDLSSLRSEDTAVYYCARGGNSAFYSYYDMDVWGQGTTVTVSSGGGGSGGGGSGGGGSDVVMTQTPLSLPVTLGQPASISCRSSQSLVYRDGNTYLSWFQQRPGQSPRRLIYKVSNWQSGVPDRFSGGGSGTDFTLKISRVEAEDVGVYYCMQGTHWPPTFGQGTKVEIKSGGGGSEVQLVESGGGLVQPGGSLRLSCAASGFTFNSYAMNWVRQAPGKGLEWVARIRSKYNNYATYYADSVKGRFTISRDDSKNTAYLQMNSLKTEDTAVYYCVRHGNFGNSYVSWWAYWGQGTLVTVSSGGGGSGGGGSGGGGSQTVVTQEPSLTVSPGGTVTLTCGSSTGAVTSGNYPNWVQQKPGQAPRGLIGGTKFLAPGTPARFSGSLLGGKAALTLSGVQPEDEAEYYCVLWYSNRWVFGGGTKLTVL

SEQ ID NO: 1253 - protein, 505 aa, Artificial Sequence
  Synthetic
QVQLVQSGAEVKKPGASVKVSCKASGYTFTGYYIHWVRQAPGQGLEWMGIINPSDGSTSYGQNFQGRVTMTRDTSTNTVYMELSSLRSEDTAVYYCARGGNSAFYSYYDMDVWGQGTTVTVSSGGGGSGGGGSGGGGSDVVMTQSPLSLPVTLGQPASISCRSSQSLAYRDGNTYLSWFQQRPGQSPRRLIYKVSNWQSGVPDRFSGSGSGTDFTLKISRVEAEDVGVYFCMQGTHWPPTFGQGTKVEIKSGGGGSEVQLVESGGGLVQPGGSLRLSCAASGFTFNSYAMNWVRQAPGKGLEWVARIRSKYNNYATYYADSVKGRFTISRDDSKNTAYLQMNSLKTEDTAVYYCVRHGNFGNSYVSWWAYWGQGTLVTVSSGGGGSGGGGSGGGGSQTVVTQEPSLTVSPGGTVTLTCGSSTGAVTSGNYPNWVQQKPGQAPRGLIGGTKFLAPGTPARFSGSLLGGKAALTLSGVQPEDEAEYYCVLWYSNRWVFGGGTKLTVL

SEQ ID NO: 1254 - protein, 505 aa, Artificial Sequence
  Synthetic
QVQLVQSGAEVKKPGASVKVSCKASGYTFTNYYMHWVRQAPGLGLEWMGIINPSDGSTSYAQKFQGRVTMTRDTSTNTVYMDLSSLRSEDTAVYYCARGGNSAFYSYYDMDVWGQGTTVTVSSGGGGSGGGGSGGGGSDVVMTQTPLSLPVTLGQPASISCRSSQSLVYREGNTYLSWFQQRPGQSPRRLIYKVSNWQSGVPDRFSGGGSGTDFTLKISRVEAEDVGVYYCMQGTHWPPTFGQGTKVEIKSGGGGSEVQLVESGGGLVQPGGSLKLSCAASGFTFNKYAMNWVRQAPGKGLEWVARIRSKYNNYATYYADSVKDRFTISRDDSKNTAYLQMNNLKTEDTAVYYCVRHGNFGNSYISYWAYWGQGTLVTVSSGGGGSGGGGSGGGGSQTVVTQEPSLTVSPGGTVTLTCGSSTGAVTSGNYPNWVQQKPGQAPRGLIGGTKFLAPGTPARFSGSLLGGKAALTLSGVQPEDEAEYYCVLWYSNRWVFGGGTKLTVL

SEQ ID NO: 1255 - protein, 505 aa, Artificial Sequence
  Synthetic
QVQLVQSGAEVKKPGASVKVSCKASGYTFTNYYMHWVRQAPGLGLEWMGIINPSDGSTSYAQKFQGRVTMTRDTSTNTVYMDLSSLRSEDTAVYYCARGGNSAFYSYYDMDVWGQGTTVTVSSGGGGSGGGGSGGGGSDVVMTQTPLSLPVTLGQPASISCRSSQSLVYRDANTYLSWFQQRPGQSPRRLIYKVSNWQSGVPDRFSGGGSGTDFTLKISRVEAEDVGVYYCMQGTHWPPTFGQGTKVEIKSGGGGSEVQLVESGGGLVQPGGSLKLSCAASGFTFNKYAMNWVRQAPGKGLEWVARIRSKYNNYATYYADSVKDRFTISRDDSKNTAYLQMNNLKTEDTAVYYCVRHGNFGNSYISYWAYWGQGTLVTVSSGGGGSGGGGSGGGGSQTVVTQEPSLTVSPGGTVTLTCGSSTGAVTSGNYPNWVQQKPGQAPRGLIGGTKFLAPGTPARFSGSLLGGKAALTLSGVQPEDEAEYYCVLWYSNRWVFGGGTKLTVL

SEQ ID NO: 1256 - protein, 505 aa, Artificial Sequence
  Synthetic
QVQLVQSGAEVKKPGASVKVSCKASGYTFTNYYMHWVRQAPGLGLEWMGIINPSDGSTSYAQKFQGRVTMTRDTSTNTVYMDLSSLRSEDTAVYYCARGGNSAFYSYYDMDVWGQGTTVTVSSGGGGSGGGGSGGGGSDVVMTQTPLSLPVTLGQPASISCRSSQSLVYRDGQTYLSWFQQRPGQSPRRLIYKVSNWQSGVPDRFSGGGSGTDFTLKISRVEAEDVGVYYCMQGTHWPPTFGQGTKVEIKSGGGGSEVQLVESGGGLVQPGGSLKLSCAASGFTFNKYAMNWVRQAPGKGLEWVARIRSKYNNYATYYADSVKDRFTISRDDSKNTAYLQMNNLKTEDTAVYYCVRHGNFGNSYISYWAYWGQGTLVTVSSGGGGSGGGGSGGGGSQTVVTQEPSLTVSPGGTVTLTCGSSTGAVTSGNYPNWVQQKPGQAPRGLIGGTKFLAPGTPARFSGSLLGGKAALTLSGVQPEDEAEYYCVLWYSNRWVFGGGTKLTVL

SEQ ID NO: 1257 - protein, 505 aa, Artificial Sequence
  Synthetic
QVQLVQSGAEVKKPGASVKVSCKASGYTFTNYYMHWVRQAPGLGLEWMGIINPSDGSTSYAQKFQGRVTMTRDTSTNTVYMDLSSLRSEDTAVYYCARGGNSAFYSYYDMDVWGQGTTVTVSSGGGGSGGGGSGGGGSDVVMTQTPLSLPVTLGQPASISCRSSQSLVYRDGNAYLSWFQQRPGQSPRRLIYKVSNWQSGVPDRFSGGGSGTDFTLKISRVEAEDVGVYYCMQGTHWPPTFGQGTKVEIKSGGGGSEVQLVESGGGLVQPGGSLKLSCAASGFTFNKYAMNWVRQAPGKGLEWVARIRSKYNNYATYYADSVKDRFTISRDDSKNTAYLQMNNLKTEDTAVYYCVRHGNFGNSYISYWAYWGQGTLVTVSSGGGGSGGGGSGGGGSQTVVTQEPSLTVSPGGTVTLTCGSSTGAVTSGNYPNWVQQKPGQAPRGLIGGTKFLAPGTPARFSGSLLGGKAALTLSGVQPEDEAEYYCVLWYSNRWVFGGGTKLTVL

SEQ ID NO: 1258 - protein, 505 aa, Artificial Sequence
  Synthetic
QVQLVQSGAEVKKPGASVKVSCKASGYTFTNYYMHWVRQAPGLGLEWMGIINPSDGSTSYAQKFQGRVTMTRDTSTNTVYMDLSSLRSEDTAVYYCARGGNSAFYSYYDMDVWGQGTTVTVSSGGGGSGGGGSGGGGSDVVMTQTPLSLPVTLGQPASISCRSSQSLVYRDGNTYLSWFQQRPGQSPRRLIYKVSNWQSGVPDRFSGSGSGTDFTLKISRVEAEDVGVYYCMQGTHWPPTFGQGTKVEIKSGGGGSEVQLVESGGGLVQPGGSLKLSCAASGFTFNKYAMNWVRQAPGKGLEWVARIRSKYNNYATYYADSVKDRFTISRDDSKNTAYLQMNNLKTEDTAVYYCVRHGNFGNSYISYWAYWGQGTLVTVSSGGGGSGGGGSGGGGSQTVVTQEPSLTVSPGGTVTLTCGSSTGAVTSGNYPNWVQQKPGQAPRGLIGGTKFLAPGTPARFSGSLLGGKAALTLSGVQPEDEAEYYCVLWYSNRWVFGGGTKLTVL

SEQ ID NO: 1259 - protein, 505 aa, Artificial Sequence
  Synthetic
QVQLVQSGAEVKKPGASVKVSCKASGYTFTNYYMHWVRQAPGQGLEWMGIINPSDGSTSYAQKFQGRVTMTRDTSTNTVYMDLSSLRSEDTAVYYCARGGNSAFYSYYDMDVWGQGTTVTVSSGGGGSGGGGSGGGGSDVVMTQTPLSLPVTLGQPASISCRSSQSLVYRDGNTYLSWFQQRPGQSPRRLIYKVSNWQSGVPDRFSGGGSGTDFTLKISRVEAEDVGVYYCMQGTHWPPTFGQGTKVEIKSGGGGSEVQLVESGGGLVQPGGSLKLSCAASGFTFNKYAMNWVRQAPGKGLEWVARIRSKYNNYATYYADSVKDRFTISRDDSKNTAYLQMNNLKTEDTAVYYCVRHGNFGNSYISYWAYWGQGTLVTVSSGGGGSGGGGSGGGGSQTVVTQEPSLTVSPGGTVTLTCGSSTGAVTSGNYPNWVQQKPGQAPRGLIGGTKFLAPGTPARFSGSLLGGKAALTLSGVQPEDEAEYYCVLWYSNRWVFGGGTKLTVL

SEQ ID NO: 1260 - protein, 505 aa, Artificial Sequence
  Synthetic
QVQLVQSGAEVKKPGASVKVSCKASGYTFTNYYMHWVRQAPGLGLEWMGIINPSEGSTSYAQKFQGRVTMTRDTSTNTVYMDLSSLRSEDTAVYYCARGGNSAFYSYYDMDVWGQGTTVTVSSGGGGSGGGGSGGGGSDVVMTQTPLSLPVTLGQPASISCRSSQSLVYRDGNTYLSWFQQRPGQSPRRLIYKVSNWQSGVPDRFSGGGSGTDFTLKISRVEAEDVGVYYCMQGTHWPPTFGQGTKVEIKSGGGGSEVQLVESGGGLVQPGGSLKLSCAASGFTFNKYAMNWVRQAPGKGLEWVARIRSKYNNYATYYADSVKDRFTISRDDSKNTAYLQMNNLKTEDTAVYYCVRHGNFGNSYISYWAYWGQGTLVTVSSGGGGSGGGGSGGGGSQTVVTQEPSLTVSPGGTVTLTCGSSTGAVTSGNYPNWVQQKPGQAPRGLIGGTKFLAPGTPARFSGSLLGGKAALTLSGVQPEDEAEYYCVLWYSNRWVFGGGTKLTVL

SEQ ID NO: 1261 - protein, 505 aa, Artificial Sequence
  Synthetic
QVQLVQSGAEVKKPGASVKVSCKASGYTFTNYYMHWVRQAPGLGLEWMGIINPSDASTSYAQKFQGRVTMTRDTSTNTVYMDLSSLRSEDTAVYYCARGGNSAFYSYYDMDVWGQGTTVTVSSGGGGSGGGGSGGGGSDVVMTQTPLSLPVTLGQPASISCRSSQSLVYRDGNTYLSWFQQRPGQSPRRLIYKVSNWQSGVPDRFSGGGSGTDFTLKISRVEAEDVGVYYCMQGTHWPPTFGQGTKVEIKSGGGGSEVQLVESGGGLVQPGGSLKLSCAASGFTFNKYAMNWVRQAPGKGLEWVARIRSKYNNYATYYADSVKDRFTISRDDSKNTAYLQMNNLKTEDTAVYYCVRHGNFGNSYISYWAYWGQGTLVTVSSGGGGSGGGGSGGGGSQTVVTQEPSLTVSPGGTVTLTCGSSTGAVTSGNYPNWVQQKPGQAPRGLIGGTKFLAPGTPARFSGSLLGGKAALTLSGVQPEDEAEYYCVLWYSNRWVFGGGTKLTVL

SEQ ID NO: 1262 - protein, 505 aa, Artificial Sequence
  Synthetic
QVQLVQSGAEVKKPGASVKVSCKASGYTFTNYYMHWVRQAPGQGLEWMGIINPSDGSTSYAQKFQGRVTMTRDTSTNTVYMDLSSLRSEDTAVYYCARGGNSAFYSYYDMDVWGQGTTVTVSSGGGGSGGGGSGGGGSDVVMTQTPLSLPVTLGQPASISCRSSQSLVYRDGNTYLSWFQQRPGQSPRRLIYKVSNWQSGVPDRFSGSGSGTDFTLKISRVEAEDVGVYYCMQGTHWPPTFGQGTKVEIKSGGGGSEVQLVESGGGLVQPGGSLKLSCAASGFTFNKYAMNWVRQAPGKGLEWVARIRSKYNNYATYYADSVKDRFTISRDDSKNTAYLQMNNLKTEDTAVYYCVRHGNFGNSYISYWAYWGQGTLVTVSSGGGGSGGGGSGGGGSQTVVTQEPSLTVSPGGTVTLTCGSSTGAVTSGNYPNWVQQKPGQAPRGLIGGTKFLAPGTPARFSGSLLGGKAALTLSGVQPEDEAEYYCVLWYSNRWVFGGGTKLTVL

SEQ ID NO: 1263 - protein, 505 aa, Artificial Sequence
  Synthetic
QVQLVQSGAEVKKPGASVKVSCKASGYTFTNYYMHWVRQAPGQGLEWMGIINPSEGSTSYAQKFQGRVTMTRDTSTNTVYMDLSSLRSEDTAVYYCARGGNSAFYSYYDMDVWGQGTTVTVSSGGGGSGGGGSGGGGSDVVMTQTPLSLPVTLGQPASISCRSSQSLVYREGNTYLSWFQQRPGQSPRRLIYKVSNWQSGVPDRFSGSGSGTDFTLKISRVEAEDVGVYYCMQGTHWPPTFGQGTKVEIKSGGGGSEVQLVESGGGLVQPGGSLKLSCAASGFTFNKYAMNWVRQAPGKGLEWVARIRSKYNNYATYYADSVKDRFTISRDDSKNTAYLQMNNLKTEDTAVYYCVRHGNFGNSYISYWAYWGQGTLVTVSSGGGGSGGGGSGGGGSQTVVTQEPSLTVSPGGTVTLTCGSSTGAVTSGNYPNWVQQKPGQAPRGLIGGTKFLAPGTPARFSGSLLGGKAALTLSGVQPEDEAEYYCVLWYSNRWVFGGGTKLTVL

SEQ ID NO: 1264 - protein, 505 aa, Artificial Sequence
  Synthetic
QVQLVQSGAEVKKPGASVKVSCKASGYTFTNYYMHWVRQAPGQGLEWMGIINPSDASTSYAQKFQGRVTMTRDTSTNTVYMDLSSLRSEDTAVYYCARGGNSAFYSYYDMDVWGQGTTVTVSSGGGGSGGGGSGGGGSDVVMTQTPLSLPVTLGQPASISCRSSQSLVYRDANTYLSWFQQRPGQSPRRLIYKVSNWQSGVPDRFSGSGSGTDFTLKISRVEAEDVGVYYCMQGTHWPPTFGQGTKVEIKSGGGGSEVQLVESGGGLVQPGGSLKLSCAASGFTFNKYAMNWVRQAPGKGLEWVARIRSKYNNYATYYADSVKDRFTISRDDSKNTAYLQMNNLKTEDTAVYYCVRHGNFGNSYISYWAYWGQGTLVTVSSGGGGSGGGGSGGGGSQTVVTQEPSLTVSPGGTVTLTCGSSTGAVTSGNYPNWVQQKPGQAPRGLIGGTKFLAPGTPARFSGSLLGGKAALTLSGVQPEDEAEYYCVLWYSNRWVFGGGTKLTVL

SEQ ID NO: 1265 - protein, 505 aa, Artificial Sequence
  Synthetic
QVQLVQSGAEVKKPGASVKVSCKASGYTFTNYYMHWVRQAPGLCLEWMGIINPSDGSTSYAQKFQGRVTMTRDTSTNTVYMDLSSLRSEDTAVYYCARGGNSAFYSYYDMDVWGQGTTVTVSSGGGGSGGGGSGGGGSDVVMTQTPLSLPVTLGQPASISCRSSQSLVYRDGNTYLSWFQQRPGQSPRRLIYKVSNWQSGVPDRFSGGGSGTDFTLKISRVEAEDVGVYYCMQGTHWPPTFGCGTKVEIKSGGGGSEVQLVESGGGLVQPGGSLKLSCAASGFTFNKYAMNWVRQAPGKGLEWVARIRSKYNNYATYYADSVKDRFTISRDDSKNTAYLQMNNLKTEDTAVYYCVRHGNFGNSYISYWAYWGQGTLVTVSSGGGGSGGGGSGGGGSQTVVTQEPSLTVSPGGTVTLTCGSSTGAVTSGNYPNWVQQKPGQAPRGLIGGTKFLAPGTPARFSGSLLGGKAALTLSGVQPEDEAEYYCVLWYSNRWVFGGGTKLTVL

SEQ ID NO: 1266 - protein, 505 aa, Artificial Sequence
  Synthetic
QVQLVQSGAEVKKPGASVKVSCKASGYTFTNYYMHWVRQAPGLCLEWMGIINPSDGSTSYAQKFQGRVTMTRDTSTNTVYMDLSSLRSEDTAVYYCARGGNSAFYSYYDMDVWGQGTTVTVSSGGGGSGGGGSGGGGSDVVMTQTPLSLPVTLGQPASISCRSSQSLVYREGNTYLSWFQQRPGQSPRRLIYKVSNWQSGVPDRFSGGGSGTDFTLKISRVEAEDVGVYYCMQGTHWPPTFGCGTKVEIKSGGGGSEVQLVESGGGLVQPGGSLKLSCAASGFTFNKYAMNWVRQAPGKGLEWVARIRSKYNNYATYYADSVKDRFTISRDDSKNTAYLQMNNLKTEDTAVYYCVRHGNFGNSYISYWAYWGQGTLVTVSSGGGGSGGGGSGGGGSQTVVTQEPSLTVSPGGTVTLTCGSSTGAVTSGNYPNWVQQKPGQAPRGLIGGTKFLAPGTPARFSGSLLGGKAALTLSGVQPEDEAEYYCVLWYSNRWVFGGGTKLTVL

SEQ ID NO: 1267 - protein, 505 aa, Artificial Sequence
  Synthetic
QVQLVQSGAEVKKPGASVKVSCKASGYTFTNYYMHWVRQAPGLCLEWMGIINPSDGSTSYAQKFQGRVTMTRDTSTNTVYMDLSSLRSEDTAVYYCARGGNSAFYSYYDMDVWGQGTTVTVSSGGGGSGGGGSGGGGSDVVMTQTPLSLPVTLGQPASISCRSSQSLVYRDANTYLSWFQQRPGQSPRRLIYKVSNWQSGVPDRFSGGGSGTDFTLKISRVEAEDVGVYYCMQGTHWPPTFGCGTKVEIKSGGGGSEVQLVESGGGLVQPGGSLKLSCAASGFTFNKYAMNWVRQAPGKGLEWVARIRSKYNNYATYYADSVKDRFTISRDDSKNTAYLQMNNLKTEDTAVYYCVRHGNFGNSYISYWAYWGQGTLVTVSSGGGGSGGGGSGGGGSQTVVTQEPSLTVSPGGTVTLTCGSSTGAVTSGNYPNWVQQKPGQAPRGLIGGTKFLAPGTPARFSGSLLGGKAALTLSGVQPEDEAEYYCVLWYSNRWVFGGGTKLTVL

SEQ ID NO: 1268 - protein, 505 aa, Artificial Sequence
  Synthetic
QVQLVQSGAEVKKPGASVKVSCKASGYTFTNYYMHWVRQAPGLCLEWMGIINPSDGSTSYAQKFQGRVTMTRDTSTNTVYMDLSSLRSEDTAVYYCARGGNSAFYSYYDMDVWGQGTTVTVSSGGGGSGGGGSGGGGSDVVMTQTPLSLPVTLGQPASISCRSSQSLVYRDGQTYLSWFQQRPGQSPRRLIYKVSNWQSGVPDRFSGGGSGTDFTLKISRVEAEDVGVYYCMQGTHWPPTFGCGTKVEIKSGGGGSEVQLVESGGGLVQPGGSLKLSCAASGFTFNKYAMNWVRQAPGKGLEWVARIRSKYNNYATYYADSVKDRFTISRDDSKNTAYLQMNNLKTEDTAVYYCVRHGNFGNSYISYWAYWGQGTLVTVSSGGGGSGGGGSGGGGSQTVVTQEPSLTVSPGGTVTLTCGSSTGAVTSGNYPNWVQQKPGQAPRGLIGGTKFLAPGTPARFSGSLLGGKAALTLSGVQPEDEAEYYCVLWYSNRWVFGGGTKLTVL

SEQ ID NO: 1269 - protein, 505 aa, Artificial Sequence
  Synthetic
QVQLVQSGAEVKKPGASVKVSCKASGYTFTNYYMHWVRQAPGLCLEWMGIINPSDGSTSYAQKFQGRVTMTRDTSTNTVYMDLSSLRSEDTAVYYCARGGNSAFYSYYDMDVWGQGTTVTVSSGGGGSGGGGSGGGGSDVVMTQTPLSLPVTLGQPASISCRSSQSLVYRDGNAYLSWFQQRPGQSPRRLIYKVSNWQSGVPDRFSGGGSGTDFTLKISRVEAEDVGVYYCMQGTHWPPTFGCGTKVEIKSGGGGSEVQLVESGGGLVQPGGSLKLSCAASGFTFNKYAMNWVRQAPGKGLEWVARIRSKYNNYATYYADSVKDRFTISRDDSKNTAYLQMNNLKTEDTAVYYCVRHGNFGNSYISYWAYWGQGTLVTVSSGGGGSGGGGSGGGGSQTVVTQEPSLTVSPGGTVTLTCGSSTGAVTSGNYPNWVQQKPGQAPRGLIGGTKFLAPGTPARFSGSLLGGKAALTLSGVQPEDEAEYYCVLWYSNRWVFGGGTKLTVL

SEQ ID NO: 1270 - protein, 505 aa, Artificial Sequence
  Synthetic
QVQLVQSGAEVKKPGASVKVSCKASGYTFTNYYMHWVRQAPGLCLEWMGIINPSDGSTSYAQKFQGRVTMTRDTSTNTVYMDLSSLRSEDTAVYYCARGGNSAFYSYYDMDVWGQGTTVTVSSGGGGSGGGGSGGGGSDVVMTQTPLSLPVTLGQPASISCRSSQSLVYRDGNTYLSWFQQRPGQSPRRLIYKVSNWQSGVPDRFSGSGSGTDFTLKISRVEAEDVGVYYCMQGTHWPPTFGCGTKVEIKSGGGGSEVQLVESGGGLVQPGGSLKLSCAASGFTFNKYAMNWVRQAPGKGLEWVARIRSKYNNYATYYADSVKDRFTISRDDSKNTAYLQMNNLKTEDTAVYYCVRHGNFGNSYISYWAYWGQGTLVTVSSGGGGSGGGGSGGGGSQTVVTQEPSLTVSPGGTVTLTCGSSTGAVTSGNYPNWVQQKPGQAPRGLIGGTKFLAPGTPARFSGSLLGGKAALTLSGVQPEDEAEYYCVLWYSNRWVFGGGTKLTVL

SEQ ID NO: 1271 - protein, 505 aa, Artificial Sequence
  Synthetic
QVQLVQSGAEVKKPGASVKVSCKASGYTFTNYYMHWVRQAPGQCLEWMGIINPSDGSTSYAQKFQGRVTMTRDTSTNTVYMDLSSLRSEDTAVYYCARGGNSAFYSYYDMDVWGQGTTVTVSSGGGGSGGGGSGGGGSDVVMTQTPLSLPVTLGQPASISCRSSQSLVYRDGNTYLSWFQQRPGQSPRRLIYKVSNWQSGVPDRFSGGGSGTDFTLKISRVEAEDVGVYYCMQGTHWPPTFGCGTKVEIKSGGGGSEVQLVESGGGLVQPGGSLKLSCAASGFTFNKYAMNWVRQAPGKGLEWVARIRSKYNNYATYYADSVKDRFTISRDDSKNTAYLQMNNLKTEDTAVYYCVRHGNFGNSYISYWAYWGQGTLVTVSSGGGGSGGGGSGGGGSQTVVTQEPSLTVSPGGTVTLTCGSSTGAVTSGNYPNWVQQKPGQAPRGLIGGTKFLAPGTPARFSGSLLGGKAALTLSGVQPEDEAEYYCVLWYSNRWVFGGGTKLTVL

SEQ ID NO: 1272 - protein, 505 aa, Artificial Sequence
  Synthetic
QVQLVQSGAEVKKPGASVKVSCKASGYTFTNYYMHWVRQAPGLCLEWMGIINPSEGSTSYAQKFQGRVTMTRDTSTNTVYMDLSSLRSEDTAVYYCARGGNSAFYSYYDMDVWGQGTTVTVSSGGGGSGGGGSGGGGSDVVMTQTPLSLPVTLGQPASISCRSSQSLVYRDGNTYLSWFQQRPGQSPRRLIYKVSNWQSGVPDRFSGGGSGTDFTLKISRVEAEDVGVYYCMQGTHWPPTFGCGTKVEIKSGGGGSEVQLVESGGGLVQPGGSLKLSCAASGFTFNKYAMNWVRQAPGKGLEWVARIRSKYNNYATYYADSVKDRFTISRDDSKNTAYLQMNNLKTEDTAVYYCVRHGNFGNSYISYWAYWGQGTLVTVSSGGGGSGGGGSGGGGSQTVVTQEPSLTVSPGGTVTLTCGSSTGAVTSGNYPNWVQQKPGQAPRGLIGGTKFLAPGTPARFSGSLLGGKAALTLSGVQPEDEAEYYCVLWYSNRWVFGGGTKLTVL

SEQ ID NO: 1273 - protein, 505 aa, Artificial Sequence
  Synthetic
QVQLVQSGAEVKKPGASVKVSCKASGYTFTNYYMHWVRQAPGLCLEWMGIINPSDASTSYAQKFQGRVTMTRDTSTNTVYMDLSSLRSEDTAVYYCARGGNSAFYSYYDMDVWGQGTTVTVSSGGGGSGGGGSGGGGSDVVMTQTPLSLPVTLGQPASISCRSSQSLVYRDGNTYLSWFQQRPGQSPRRLIYKVSNWQSGVPDRFSGGGSGTDFTLKISRVEAEDVGVYYCMQGTHWPPTFGCGTKVEIKSGGGGSEVQLVESGGGLVQPGGSLKLSCAASGFTFNKYAMNWVRQAPGKGLEWVARIRSKYNNYATYYADSVKDRFTISRDDSKNTAYLQMNNLKTEDTAVYYCVRHGNFGNSYISYWAYWGQGTLVTVSSGGGGSGGGGSGGGGSQTVVTQEPSLTVSPGGTVTLTCGSSTGAVTSGNYPNWVQQKPGQAPRGLIGGTKFLAPGTPARFSGSLLGGKAALTLSGVQPEDEAEYYCVLWYSNRWVFGGGTKLTVL

SEQ ID NO: 1274 - protein, 505 aa, Artificial Sequence
  Synthetic
QVQLVQSGAEVKKPGASVKVSCKASGYTFTNYYMHWVRQAPGQCLEWMGIINPSDGSTSYAQKFQGRVTMTRDTSTNTVYMDLSSLRSEDTAVYYCARGGNSAFYSYYDMDVWGQGTTVTVSSGGGGSGGGGSGGGGSDVVMTQTPLSLPVTLGQPASISCRSSQSLVYRDGNTYLSWFQQRPGQSPRRLIYKVSNWQSGVPDRFSGSGSGTDFTLKISRVEAEDVGVYYCMQGTHWPPTFGCGTKVEIKSGGGGSEVQLVESGGGLVQPGGSLKLSCAASGFTFNKYAMNWVRQAPGKGLEWVARIRSKYNNYATYYADSVKDRFTISRDDSKNTAYLQMNNLKTEDTAVYYCVRHGNFGNSYISYWAYWGQGTLVTVSSGGGGSGGGGSGGGGSQTVVTQEPSLTVSPGGTVTLTCGSSTGAVTSGNYPNWVQQKPGQAPRGLIGGTKFLAPGTPARFSGSLLGGKAALTLSGVQPEDEAEYYCVLWYSNRWVFGGGTKLTVL

SEQ ID NO: 1275 - protein, 505 aa, Artificial Sequence
  Synthetic
QVQLVQSGAEVKKPGASVKVSCKASGYTFTNYYMHWVRQAPGQCLEWMGIINPSEGSTSYAQKFQGRVTMTRDTSTNTVYMDLSSLRSEDTAVYYCARGGNSAFYSYYDMDVWGQGTTVTVSSGGGGSGGGGSGGGGSDVVMTQTPLSLPVTLGQPASISCRSSQSLVYREGNTYLSWFQQRPGQSPRRLIYKVSNWQSGVPDRFSGSGSGTDFTLKISRVEAEDVGVYYCMQGTHWPPTFGCGTKVEIKSGGGGSEVQLVESGGGLVQPGGSLKLSCAASGFTFNKYAMNWVRQAPGKGLEWVARIRSKYNNYATYYADSVKDRFTISRDDSKNTAYLQMNNLKTEDTAVYYCVRHGNFGNSYISYWAYWGQGTLVTVSSGGGGSGGGGSGGGGSQTVVTQEPSLTVSPGGTVTLTCGSSTGAVTSGNYPNWVQQKPGQAPRGLIGGTKFLAPGTPARFSGSLLGGKAALTLSGVQPEDEAEYYCVLWYSNRWVFGGGTKLTVL

SEQ ID NO: 1276 - protein, 505 aa, Artificial Sequence
  Synthetic
QVQLVQSGAEVKKPGASVKVSCKASGYTFTNYYMHWVRQAPGQCLEWMGIINPSDASTSYAQKFQGRVTMTRDTSTNTVYMDLSSLRSEDTAVYYCARGGNSAFYSYYDMDVWGQGTTVTVSSGGGGSGGGGSGGGGSDVVMTQTPLSLPVTLGQPASISCRSSQSLVYRDANTYLSWFQQRPGQSPRRLIYKVSNWQSGVPDRFSGSGSGTDFTLKISRVEAEDVGVYYCMQGTHWPPTFGCGTKVEIKSGGGGSEVQLVESGGGLVQPGGSLKLSCAASGFTFNKYAMNWVRQAPGKGLEWVARIRSKYNNYATYYADSVKDRFTISRDDSKNTAYLQMNNLKTEDTAVYYCVRHGNFGNSYISYWAYWGQGTLVTVSSGGGGSGGGGSGGGGSQTVVTQEPSLTVSPGGTVTLTCGSSTGAVTSGNYPNWVQQKPGQAPRGLIGGTKFLAPGTPARFSGSLLGGKAALTLSGVQPEDEAEYYCVLWYSNRWVFGGGTKLTVL

SEQ ID NO: 1277 - protein, 984 aa, Artificial Sequence
  Synthetic
QVQLQESGPGLVKPSETLSLTCTVSGGSISSYYWSWIRQPPGKGLEWIGYVYYSGTTNYNPSLKSRVTISVDTSKNQFSLKLSSVTAADTAVYYCASIAVTGFYFDYWGQGTLVTVSSGGGGSGGGGSGGGGSEIVLTQSPGTLSLSPGERVTLSCRASQRVNNNYLAWYQQRPGQAPRLLIYGASSRATGIPDRFSGSGSGTDFTLTISRLEPEDFAVYYCQQYDRSPLTFGGGTKLEIKSGGGGSEVQLVESGGGLVQPGGSLKLSCAASGFTFNKYAMNWVRQAPGKGLEWVARIRSKYNNYATYYADSVKDRFTISRDDSKNTAYLQMNNLKTEDTAVYYCVRHGNFGNSYISYWAYWGQGTLVTVSSGGGGSGGGGSGGGGSQTVVTQEPSLTVSPGGTVTLTCGSSTGAVTSGNYPNWVQQKPGQAPRGLIGGTKFLAPGTPARFSGSLLGGKAALTLSGVQPEDEAEYYCVLWYSNRWVFGGGTKLTVLGGGGDKTHTCPPCPAPELLGGPSVFLFPPKPKDTLMISRTPEVTCVVVDVSHEDPEVKFNWYVDGVEVHNAKTKPCEEQYGSTYRCVSVLTVLHQDWLNGKEYKCKVSNKALPAPIEKTISKAKGQPREPQVYTLPPSREEMTKNQVSLTCLVKGFYPSDIAVEWESNGQPENNYKTTPPVLDSDGSFFLYSKLTVDKSRWQQGNVFSCSVMHEALHNHYTQKSLSLSPGKGGGGSGGGGSGGGGSGGGGSGGGGSGGGGSDKTHTCPPCPAPELLGGPSVFLFPPKPKDTLMISRTPEVTCVVVDVSHEDPEVKFNWYVDGVEVHNAKTKPCEEQYGSTYRCVSVLTVLHQDWLNGKEYKCKVSNKALPAPIEKTISKAKGQPREPQVYTLPPSREEMTKNQVSLTCLVKGFYPSDIAVEWESNGQPENNYKTTPPVLDSDGSFFLYSKLTVDKSRWQQGNVFSCSVMHEALHNHYTQKSLSLSPGK

SEQ ID NO: 1278 - protein, 982 aa, Artificial Sequence
  Synthetic
QVQLQESGPGLVKPSETLSLTCTVSGGSISSYYWSWIRQPPGKGLEWIGYVYYSGTTNYNPSLKSRVTISVDTSKNQFSLKLSSVTAADTAVYYCASIAVTGFYFDYWGQGTLVTVSSGGGGSGGGGSGGGGSEIVLTQSPGTLSLSPGERVTLSCRASQRVNNNYLAWYQQRPGQAPRLLIYGASSRATGIPDRFSGSGSGTDFTLTISRLEPEDFAVYYCQQYDRSPLTFGGGTKLEIKSGGGGSEVQLVESGGGLVQPGGSLKLSCAASGFTFNKYAMNWVRQAPGKGLEWVARIRSKYNNYATYYADSVKDRFTISRDDSKNTAYLQMNNLKTEDTAVYYCVRHGNFGNSYISYWAYWGQGTLVTVSSGGGGSGGGGSGGGGSQTVVTQEPSLTVSPGGTVTLTCGSSTGAVTSGNYPNWVQQKPGQAPRGLIGGTKFLAPGTPARFSGSLLGGKAALTLSGVQPEDEAEYYCVLWYSNRWVFGGGTKLTVLGGGGDKTHTCPPCPAPELLGGPSVFLFPPKPKDTLMISRTPEVTCVVVDVSHEDPEVKFNWYVDGVEVHNAKTKPCEEQYGSTYRCVSVLTVLHQDWLNGKEYKCKVSNKALPAPIEKTISKAKGQPREPQVYTLPPSREEMTKNQVSLTCLVKGFYPSDIAVEWESNGQPENNYKTTPPVLDSDGSFFLYSKLTVDKSRWQQGNVFSCSVMHEALHNHYTQKSLSLSPGGGGSGGGGSGGGGSGGGGSGGGGSGGGGSDKTHTCPPCPAPELLGGPSVFLFPPKPKDTLMISRTPEVTCVVVDVSHEDPEVKFNWYVDGVEVHNAKTKPCEEQYGSTYRCVSVLTVLHQDWLNGKEYKCKVSNKALPAPIEKTISKAKGQPREPQVYTLPPSREEMTKNQVSLTCLVKGFYPSDIAVEWESNGQPENNYKTTPPVLDSDGSFFLYSKLTVDKSRWQQGNVFSCSVMHEALHNHYTQKSLSLSPGK

SEQ ID NO: 1279 - protein, 984 aa, Artificial Sequence
  Synthetic
QVQLQESGPGLVKPSETLSLTCTVSGGSISSYYWSWIRQPPGKCLEWIGYVYYSGTTNYNPSLKSRVTISVDTSKNQFSLKLSSVTAADTAVYYCASIAVTGFYFDYWGQGTLVTVSSGGGGSGGGGSGGGGSEIVLTQSPGTLSLSPGERVTLSCRASQRVNNNYLAWYQQRPGQAPRLLIYGASSRATGIPDRFSGSGSGTDFTLTISRLEPEDFAVYYCQQYDRSPLTFGCGTKLEIKSGGGGSEVQLVESGGGLVQPGGSLKLSCAASGFTFNKYAMNWVRQAPGKGLEWVARIRSKYNNYATYYADSVKDRFTISRDDSKNTAYLQMNNLKTEDTAVYYCVRHGNFGNSYISYWAYWGQGTLVTVSSGGGGSGGGGSGGGGSQTVVTQEPSLTVSPGGTVTLTCGSSTGAVTSGNYPNWVQQKPGQAPRGLIGGTKFLAPGTPARFSGSLLGGKAALTLSGVQPEDEAEYYCVLWYSNRWVFGGGTKLTVLGGGGDKTHTCPPCPAPELLGGPSVFLFPPKPKDTLMISRTPEVTCVVVDVSHEDPEVKFNWYVDGVEVHNAKTKPCEEQYGSTYRCVSVLTVLHQDWLNGKEYKCKVSNKALPAPIEKTISKAKGQPREPQVYTLPPSREEMTKNQVSLTCLVKGFYPSDIAVEWESNGQPENNYKTTPPVLDSDGSFFLYSKLTVDKSRWQQGNVFSCSVMHEALHNHYTQKSLSLSPGKGGGGSGGGGSGGGGSGGGGSGGGGSGGGGSDKTHTCPPCPAPELLGGPSVFLFPPKPKDTLMISRTPEVTCVVVDVSHEDPEVKFNWYVDGVEVHNAKTKPCEEQYGSTYRCVSVLTVLHQDWLNGKEYKCKVSNKALPAPIEKTISKAKGQPREPQVYTLPPSREEMTKNQVSLTCLVKGFYPSDIAVEWESNGQPENNYKTTPPVLDSDGSFFLYSKLTVDKSRWQQGNVFSCSVMHEALHNHYTQKSLSLSPGK

SEQ ID NO: 1280 - protein, 982 aa, Artificial Sequence
  Synthetic
QVQLQESGPGLVKPSETLSLTCTVSGGSISSYYWSWIRQPPGKCLEWIGYVYYSGTTNYNPSLKSRVTISVDTSKNQFSLKLSSVTAADTAVYYCASIAVTGFYFDYWGQGTLVTVSSGGGGSGGGGSGGGGSEIVLTQSPGTLSLSPGERVTLSCRASQRVNNNYLAWYQQRPGQAPRLLIYGASSRATGIPDRFSGSGSGTDFTLTISRLEPEDFAVYYCQQYDRSPLTFGCGTKLEIKSGGGGSEVQLVESGGGLVQPGGSLKLSCAASGFTFNKYAMNWVRQAPGKGLEWVARIRSKYNNYATYYADSVKDRFTISRDDSKNTAYLQMNNLKTEDTAVYYCVRHGNFGNSYISYWAYWGQGTLVTVSSGGGGSGGGGSGGGGSQTVVTQEPSLTVSPGGTVTLTCGSSTGAVTSGNYPNWVQQKPGQAPRGLIGGTKFLAPGTPARFSGSLLGGKAALTLSGVQPEDEAEYYCVLWYSNRWVFGGGTKLTVLGGGGDKTHTCPPCPAPELLGGPSVFLFPPKPKDTLMISRTPEVTCVVVDVSHEDPEVKFNWYVDGVEVHNAKTKPCEEQYGSTYRCVSVLTVLHQDWLNGKEYKCKVSNKALPAPIEKTISKAKGQPREPQVYTLPPSREEMTKNQVSLTCLVKGFYPSDIAVEWESNGQPENNYKTTPPVLDSDGSFFLYSKLTVDKSRWQQGNVFSCSVMHEALHNHYTQKSLSLSPGGGGSGGGGSGGGGSGGGGSGGGGSGGGGSDKTHTCPPCPAPELLGGPSVFLFPPKPKDTLMISRTPEVTCVVVDVSHEDPEVKFNWYVDGVEVHNAKTKPCEEQYGSTYRCVSVLTVLHQDWLNGKEYKCKVSNKALPAPIEKTISKAKGQPREPQVYTLPPSREEMTKNQVSLTCLVKGFYPSDIAVEWESNGQPENNYKTTPPVLDSDGSFFLYSKLTVDKSRWQQGNVFSCSVMHEALHNHYTQKSLSLSPGK

SEQ ID NO: 1281 - protein, 984 aa, Artificial Sequence
  Synthetic
QVQLQESGPGLVKPSETLSLTCTVSGASISSFYWSWIRQPPGKGLEWIGYIYYSGTTNYNPSLKSRVTISVDTSKNQFSLKLSSVTAADTAVYYCARIAVAGFFFDYWGQGTLVTVSSGGGGSGGGGSGGGGSEIVLTQSPGTLSLSPGERATLSCRASQSVNKNYLAWYQQKPGQAPRLLIYGASSRATGIPDRFSGSGSGTDFTLTISRLEPEDFAVYYCQQYDRSPLTFGGGTKVEIKSGGGGSEVQLVESGGGLVQPGGSLKLSCAASGFTFNKYAMNWVRQAPGKGLEWVARIRSKYNNYATYYADSVKDRFTISRDDSKNTAYLQMNNLKTEDTAVYYCVRHGNFGNSYISYWAYWGQGTLVTVSSGGGGSGGGGSGGGGSQTVVTQEPSLTVSPGGTVTLTCGSSTGAVTSGNYPNWVQQKPGQAPRGLIGGTKFLAPGTPARFSGSLLGGKAALTLSGVQPEDEAEYYCVLWYSNRWVFGGGTKLTVLGGGGDKTHTCPPCPAPELLGGPSVFLFPPKPKDTLMISRTPEVTCVVVDVSHEDPEVKFNWYVDGVEVHNAKTKPCEEQYGSTYRCVSVLTVLHQDWLNGKEYKCKVSNKALPAPIEKTISKAKGQPREPQVYTLPPSREEMTKNQVSLTCLVKGFYPSDIAVEWESNGQPENNYKTTPPVLDSDGSFFLYSKLTVDKSRWQQGNVFSCSVMHEALHNHYTQKSLSLSPGKGGGGSGGGGSGGGGSGGGGSGGGGSGGGGSDKTHTCPPCPAPELLGGPSVFLFPPKPKDTLMISRTPEVTCVVVDVSHEDPEVKFNWYVDGVEVHNAKTKPCEEQYGSTYRCVSVLTVLHQDWLNGKEYKCKVSNKALPAPIEKTISKAKGQPREPQVYTLPPSREEMTKNQVSLTCLVKGFYPSDIAVEWESNGQPENNYKTTPPVLDSDGSFFLYSKLTVDKSRWQQGNVFSCSVMHEALHNHYTQKSLSLSPGK

SEQ ID NO: 1282 - protein, 982 aa, Artificial Sequence
  Synthetic
QVQLQESGPGLVKPSETLSLTCTVSGASISSFYWSWIRQPPGKGLEWIGYIYYSGTTNYNPSLKSRVTISVDTSKNQFSLKLSSVTAADTAVYYCARIAVAGFFFDYWGQGTLVTVSSGGGGSGGGGSGGGGSEIVLTQSPGTLSLSPGERATLSCRASQSVNKNYLAWYQQKPGQAPRLLIYGASSRATGIPDRFSGSGSGTDFTLTISRLEPEDFAVYYCQQYDRSPLTFGGGTKVEIKSGGGGSEVQLVESGGGLVQPGGSLKLSCAASGFTFNKYAMNWVRQAPGKGLEWVARIRSKYNNYATYYADSVKDRFTISRDDSKNTAYLQMNNLKTEDTAVYYCVRHGNFGNSYISYWAYWGQGTLVTVSSGGGGSGGGGSGGGGSQTVVTQEPSLTVSPGGTVTLTCGSSTGAVTSGNYPNWVQQKPGQAPRGLIGGTKFLAPGTPARFSGSLLGGKAALTLSGVQPEDEAEYYCVLWYSNRWVFGGGTKLTVLGGGGDKTHTCPPCPAPELLGGPSVFLFPPKPKDTLMISRTPEVTCVVVDVSHEDPEVKFNWYVDGVEVHNAKTKPCEEQYGSTYRCVSVLTVLHQDWLNGKEYKCKVSNKALPAPIEKTISKAKGQPREPQVYTLPPSREEMTKNQVSLTCLVKGFYPSDIAVEWESNGQPENNYKTTPPVLDSDGSFFLYSKLTVDKSRWQQGNVFSCSVMHEALHNHYTQKSLSLSPGGGGSGGGGSGGGGSGGGGSGGGGSGGGGSDKTHTCPPCPAPELLGGPSVFLFPPKPKDTLMISRTPEVTCVVVDVSHEDPEVKFNWYVDGVEVHNAKTKPCEEQYGSTYRCVSVLTVLHQDWLNGKEYKCKVSNKALPAPIEKTISKAKGQPREPQVYTLPPSREEMTKNQVSLTCLVKGFYPSDIAVEWESNGQPENNYKTTPPVLDSDGSFFLYSKLTVDKSRWQQGNVFSCSVMHEALHNHYTQKSLSLSPGK

SEQ ID NO: 1283 - protein, 984 aa, Artificial Sequence
  Synthetic
QVQLQESGPGLVKPSETLSLTCTVSGASISSFYWSWIRQPPGKCLEWIGYIYYSGTTNYNPSLKSRVTISVDTSKNQFSLKLSSVTAADTAVYYCARIAVAGFFFDYWGQGTLVTVSSGGGGSGGGGSGGGGSEIVLTQSPGTLSLSPGERATLSCRASQSVNKNYLAWYQQKPGQAPRLLIYGASSRATGIPDRFSGSGSGTDFTLTISRLEPEDFAVYYCQQYDRSPLTFGCGTKVEIKSGGGGSEVQLVESGGGLVQPGGSLKLSCAASGFTFNKYAMNWVRQAPGKGLEWVARIRSKYNNYATYYADSVKDRFTISRDDSKNTAYLQMNNLKTEDTAVYYCVRHGNFGNSYISYWAYWGQGTLVTVSSGGGGSGGGGSGGGGSQTVVTQEPSLTVSPGGTVTLTCGSSTGAVTSGNYPNWVQQKPGQAPRGLIGGTKFLAPGTPARFSGSLLGGKAALTLSGVQPEDEAEYYCVLWYSNRWVFGGGTKLTVLGGGGDKTHTCPPCPAPELLGGPSVFLFPPKPKDTLMISRTPEVTCVVVDVSHEDPEVKFNWYVDGVEVHNAKTKPCEEQYGSTYRCVSVLTVLHQDWLNGKEYKCKVSNKALPAPIEKTISKAKGQPREPQVYTLPPSREEMTKNQVSLTCLVKGFYPSDIAVEWESNGQPENNYKTTPPVLDSDGSFFLYSKLTVDKSRWQQGNVFSCSVMHEALHNHYTQKSLSLSPGKGGGGSGGGGSGGGGSGGGGSGGGGSGGGGSDKTHTCPPCPAPELLGGPSVFLFPPKPKDTLMISRTPEVTCVVVDVSHEDPEVKFNWYVDGVEVHNAKTKPCEEQYGSTYRCVSVLTVLHQDWLNGKEYKCKVSNKALPAPIEKTISKAKGQPREPQVYTLPPSREEMTKNQVSLTCLVKGFYPSDIAVEWESNGQPENNYKTTPPVLDSDGSFFLYSKLTVDKSRWQQGNVFSCSVMHEALHNHYTQKSLSLSPGK

SEQ ID NO: 1284 - protein, 982 aa, Artificial Sequence
  Synthetic
QVQLQESGPGLVKPSETLSLTCTVSGASISSFYWSWIRQPPGKCLEWIGYIYYSGTTNYNPSLKSRVTISVDTSKNQFSLKLSSVTAADTAVYYCARIAVAGFFFDYWGQGTLVTVSSGGGGSGGGGSGGGGSEIVLTQSPGTLSLSPGERATLSCRASQSVNKNYLAWYQQKPGQAPRLLIYGASSRATGIPDRFSGSGSGTDFTLTISRLEPEDFAVYYCQQYDRSPLTFGCGTKVEIKSGGGGSEVQLVESGGGLVQPGGSLKLSCAASGFTFNKYAMNWVRQAPGKGLEWVARIRSKYNNYATYYADSVKDRFTISRDDSKNTAYLQMNNLKTEDTAVYYCVRHGNFGNSYISYWAYWGQGTLVTVSSGGGGSGGGGSGGGGSQTVVTQEPSLTVSPGGTVTLTCGSSTGAVTSGNYPNWVQQKPGQAPRGLIGGTKFLAPGTPARFSGSLLGGKAALTLSGVQPEDEAEYYCVLWYSNRWVFGGGTKLTVLGGGGDKTHTCPPCPAPELLGGPSVFLFPPKPKDTLMISRTPEVTCVVVDVSHEDPEVKFNWYVDGVEVHNAKTKPCEEQYGSTYRCVSVLTVLHQDWLNGKEYKCKVSNKALPAPIEKTISKAKGQPREPQVYTLPPSREEMTKNQVSLTCLVKGFYPSDIAVEWESNGQPENNYKTTPPVLDSDGSFFLYSKLTVDKSRWQQGNVFSCSVMHEALHNHYTQKSLSLSPGGGGSGGGGSGGGGSGGGGSGGGGSGGGGSDKTHTCPPCPAPELLGGPSVFLFPPKPKDTLMISRTPEVTCVVVDVSHEDPEVKFNWYVDGVEVHNAKTKPCEEQYGSTYRCVSVLTVLHQDWLNGKEYKCKVSNKALPAPIEKTISKAKGQPREPQVYTLPPSREEMTKNQVSLTCLVKGFYPSDIAVEWESNGQPENNYKTTPPVLDSDGSFFLYSKLTVDKSRWQQGNVFSCSVMHEALHNHYTQKSLSLSPGK

SEQ ID NO: 1285 - protein, 5 aa, Artificial Sequence
  Synthetic
GYYMH

SEQ ID NO: 1286 - protein, 17 aa, Artificial Sequence
  Synthetic
WINPNSGGTKYAQKFQG

SEQ ID NO: 1287 - protein, 16 aa, Artificial Sequence
  Synthetic
DRITVAGTYYYYGMDV

SEQ ID NO: 1288 - protein, 11 aa, Artificial Sequence
  Synthetic
RASQGVNNWLA

SEQ ID NO: 1289 - protein, 7 aa, Artificial Sequence
  Synthetic
TASSLQS

SEQ ID NO: 1290 - protein, 9 aa, Artificial Sequence
  Synthetic
QQANSFPIT

SEQ ID NO: 1291 - protein, 125 aa, Artificial Sequence
  Synthetic
QVQLVQSGAEVKKPGASVKVSCKASGYTFTGYYMHWVRQAPGQCLEWMGWINPNSGGTKYAQKFQGRVTMTRDTSISTAYMELSRLRSDDTAVYYCARDRITVAGTYYYYGMDVWGQGTTVTVSS

SEQ ID NO: 1292 - protein, 107 aa, Artificial Sequence
  Synthetic
DIQMTQSPSSVSASVGDRVTITCRASQGVNNWLAWYQQKPGKAPKLLIYTASSLQSGVPSRFSGSGSGTDFTLTIRSLQPEDFATYYCQQANSFPITFGCGTRLEIK

SEQ ID NO: 1293 - protein, 986 aa, Artificial Sequence
  Synthetic
QVQLVQSGAEVKKPGASVKVSCKASGYTFTNHIIHWVRQAPGQCLEWMGYINPYPGYHAYNEKFQGRATMTSDTSTSTVYMELSSLRSEDTAVYYCARDGYYRDTDVLDYWGQGTLVTVSSGGGGSGGGGSGGGGSDIQMTQSPSSLSASVGDRVTITCQASQDISNYLNWYQQKPGKAPKLLIYYTSRLHTGVPSRFSGSGSGTDFTFTISSLEPEDIATYYCQQGNTLPWTFGCGTKVEIKSGGGGSEVQLVESGGGLVQPGGSLKLSCAASGFTFNKYAMNWVRQAPGKGLEWVARIRSKYNNYATYYADSVKDRFTISRDDSKNTAYLQMNNLKTEDTAVYYCVRHGNFGNSYISYWAYWGQGTLVTVSSGGGGSGGGGSGGGGSQTVVTQEPSLTVSPGGTVTLTCGSSTGAVTSGNYPNWVQQKPGQAPRGLIGGTKFLAPGTPARFSGSLLGGKAALTLSGVQPEDEAEYYCVLWYSNRWVFGGGTKLTVLGGGGDKTHTCPPCPAPELLGGPSVFLFPPKPKDTLMISRTPEVTCVVVDVSHEDPEVKFNWYVDGVEVHNAKTKPCEEQYGSTYRCVSVLTVLHQDWLNGKEYKCKVSNKALPAPIEKTISKAKGQPREPQVYTLPPSREEMTKNQVSLTCLVKGFYPSDIAVEWESNGQPENNYKTTPPVLDSDGSFFLYSKLTVDKSRWQQGNVFSCSVMHEALHNHYTQKSLSLSPGKGGGGSGGGGSGGGGSGGGGSGGGGSGGGGSDKTHTCPPCPAPELLGGPSVFLFPPKPKDTLMISRTPEVTCVVVDVSHEDPEVKFNWYVDGVEVHNAKTKPCEEQYGSTYRCVSVLTVLHQDWLNGKEYKCKVSNKALPAPIEKTISKAKGQPREPQVYTLPPSREEMTKNQVSLTCLVKGFYPSDIAVEWESNGQPENNYKTTPPVLDSDGSFFLYSKLTVDKSRWQQGNVFSCSVMHEALHNHYTQKSLSLSPGK

SEQ ID NO: 1294 - protein, 990 aa, Artificial Sequence
  Synthetic
QVQLVQSGAEVKKPGASVKVSCKASGYTFTGYYMHWVRQAPGQCLEWMGWINPNSGGTKYAQKFQGRVTMTRDTSISTAYMELSRLRSDDTAVYYCARDRITVAGTYYYYGMDVWGQGTTVTVSSGGGGSGGGGSGGGGSDIQMTQSPSSVSASVGDRVTITCRASQGVNNWLAWYQQKPGKAPKLLIYTASSLQSGVPSRFSGSGSGTDFTLTIRSLQPEDFATYYCQQANSFPITFGCGTRLEIKSGGGGSEVQLVESGGGLVQPGGSLKLSCAASGFTFNKYAMNWVRQAPGKGLEWVARIRSKYNNYATYYADSVKDRFTISRDDSKNTAYLQMNNLKTEDTAVYYCVRHGNFGNSYISYWAYWGQGTLVTVSSGGGGSGGGGSGGGGSQTVVTQEPSLTVSPGGTVTLTCGSSTGAVTSGNYPNWVQQKPGQAPRGLIGGTKFLAPGTPARFSGSLLGGKAALTLSGVQPEDEAEYYCVLWYSNRWVFGGGTKLTVLGGGGDKTHTCPPCPAPELLGGPSVFLFPPKPKDTLMISRTPEVTCVVVDVSHEDPEVKFNWYVDGVEVHNAKTKPCEEQYGSTYRCVSVLTVLHQDWLNGKEYKCKVSNKALPAPIEKTISKAKGQPREPQVYTLPPSREEMTKNQVSLTCLVKGFYPSDIAVEWESNGQPENNYKTTPPVLDSDGSFFLYSKLTVDKSRWQQGNVFSCSVMHEALHNHYTQKSLSLSPGKGGGGSGGGGSGGGGSGGGGSGGGGSGGGGSDKTHTCPPCPAPELLGGPSVFLFPPKPKDTLMISRTPEVTCVVVDVSHEDPEVKFNWYVDGVEVHNAKTKPCEEQYGSTYRCVSVLTVLHQDWLNGKEYKCKVSNKALPAPIEKTISKAKGQPREPQVYTLPPSREEMTKNQVSLTCLVKGFYPSDIAVEWESNGQPENNYKTTPPVLDSDGSFFLYSKLTVDKSRWQQGNVFSCSVMHEALHNHYTQKSLSLSPGK

SEQ ID NO: 1295 - protein, 984 aa, Artificial Sequence
  Synthetic
QVQLQQWGAGLLKPSETLSLTCAVYGGSFSGYYWSWIRQPPGKCLEWIGDIDASGSTKYNPSLKSRVTISLDTSKNQFSLKLNSVTAADTAVYFCARKKYSTVWSYFDNWGQGTLVTVSSGGGGSGGGGSGGGGSSYELTQPSSVSVPPGQTASITCSGDKLGDKYASWYQQKPGQSPVLVIYQDRKRPSGVPERFSGSNSGNTATLTISGTQAMDEADYYCQAWGSSTAVFGCGTKLTVLSGGGGSEVQLVESGGGLVQPGGSLKLSCAASGFTFNKYAMNWVRQAPGKGLEWVARIRSKYNNYATYYADSVKDRFTISRDDSKNTAYLQMNNLKTEDTAVYYCVRHGNFGNSYISYWAYWGQGTLVTVSSGGGGSGGGGSGGGGSQTVVTQEPSLTVSPGGTVTLTCGSSTGAVTSGNYPNWVQQKPGQAPRGLIGGTKFLAPGTPARFSGSLLGGKAALTLSGVQPEDEAEYYCVLWYSNRWVFGGGTKLTVLGGGGDKTHTCPPCPAPELLGGPSVFLFPPKPKDTLMISRTPEVTCVVVDVSHEDPEVKFNWYVDGVEVHNAKTKPCEEQYGSTYRCVSVLTVLHQDWLNGKEYKCKVSNKALPAPIEKTISKAKGQPREPQVYTLPPSREEMTKNQVSLTCLVKGFYPSDIAVEWESNGQPENNYKTTPPVLDSDGSFFLYSKLTVDKSRWQQGNVFSCSVMHEALHNHYTQKSLSLSPGKGGGGSGGGGSGGGGSGGGGSGGGGSGGGGSDKTHTCPPCPAPELLGGPSVFLFPPKPKDTLMISRTPEVTCVVVDVSHEDPEVKFNWYVDGVEVHNAKTKPCEEQYGSTYRCVSVLTVLHQDWLNGKEYKCKVSNKALPAPIEKTISKAKGQPREPQVYTLPPSREEMTKNQVSLTCLVKGFYPSDIAVEWESNGQPENNYKTTPPVLDSDGSFFLYSKLTVDKSRWQQGNVFSCSVMHEALHNHYTQKSLSLSPGK
